United States Patent Application Publication US 2022/0211063 A1 - sequence listing, part 24

SEQ ID NO: 57 - DNA, 4395334 bp, Penicillium roqueforti (residues 1-1,465,112 of 4,395,334)
  misc_feature (85030)..(85334): n is a, c, g, or t
  misc_feature (96910)..(97033): n is a, c, g, or t
  misc_feature (167455)..(168879): n is a, c, g, or t
  misc_feature (174643)..(174783): n is a, c, g, or t
  misc_feature (186873)..(192763): n is a, c, g, or t
  misc_feature (360706)..(360897): n is a, c, g, or t
  misc_feature (391845)..(392004): n is a, c, g, or t
  misc_feature (496629)..(496817): n is a, c, g, or t
  misc_feature (596161)..(596390): n is a, c, g, or t
  misc_feature (682712)..(683342): n is a, c, g, or t
  misc_feature (719014)..(719102): n is a, c, g, or t
  misc_feature (843400)..(843569): n is a, c, g, or t
  misc_feature (1092679)..(1092850): n is a, c, g, or t
  misc_feature (1157512)..(1162611): n is a, c, g, or t
  misc_feature (1192529)..(1192706): n is a, c, g, or t
  misc_feature (1228209)..(1228320): n is a, c, g, or t
  misc_feature (1338737)..(1338892): n is a, c, g, or t
  misc_feature (1570123)..(1570324): n is a, c, g, or t
  misc_feature (1572372)..(1573009): n is a, c, g, or t
  misc_feature (1778877)..(1779024): n is a, c, g, or t
  misc_feature (2068364)..(2068441): n is a, c, g, or t
  misc_feature (2226839)..(2227058): n is a, c, g, or t
  misc_feature (2309540)..(2309695): n is a, c, g, or t
  misc_feature (2399113)..(2399292): n is a, c, g, or t
  misc_feature (2467946)..(2468162): n is a, c, g, or t
  misc_feature (2498485)..(2498544): n is a, c, g, or t
  misc_feature (2576370)..(2576625): n is a, c, g, or t
  misc_feature (2701158)..(2701378): n is a, c, g, or t
  misc_feature (2766258)..(2766373): n is a, c, g, or t
  misc_feature (2901097)..(2901361): n is a, c, g, or t
  misc_feature (2994151)..(2994296): n is a, c, g, or t
  misc_feature (3046010)..(3046130): n is a, c, g, or t
  misc_feature (3064156)..(3064486): n is a, c, g, or t
  misc_feature (3130941)..(3131099): n is a, c, g, or t
  misc_feature (3154875)..(3155622): n is a, c, g, or t
  misc_feature (3156577)..(3156888): n is a, c, g, or t
  misc_feature (3186839)..(3187499): n is a, c, g, or t
  misc_feature (3198386)..(3198657): n is a, c, g, or t
  misc_feature (3203091)..(3205065): n is a, c, g, or t
  misc_feature (3205792)..(3206104): n is a, c, g, or t
  misc_feature (3207550)..(3207708): n is a, c, g, or t
  misc_feature (3257243)..(3260840): n is a, c, g, or t
  misc_feature (3261646)..(3386645): n is a, c, g, or t
  misc_feature (3388107)..(3394537): n is a, c, g, or t
  misc_feature (3513814)..(3514144): n is a, c, g, or t
  misc_feature (3520662)..(3521054): n is a, c, g, or t
  misc_feature (3528475)..(3531029): n is a, c, g, or t
  misc_feature (3533420)..(3533531): n is a, c, g, or t
  misc_feature (3543907)..(3544094): n is a, c, g, or t
  misc_feature (3640708)..(3640899): n is a, c, g, or t
  misc_feature (3767906)..(3769628): n is a, c, g, or t
  misc_feature (3862252)..(3862586): n is a, c, g, or t
  misc_feature (3867623)..(3868260): n is a, c, g, or t
  misc_feature (3873822)..(3874513): n is a, c, g, or t
  misc_feature (3907202)..(3907429): n is a, c, g, or t
  misc_feature (4023279)..(4023435): n is a, c, g, or t
  misc_feature (4214328)..(4214473): n is a, c, g, or t
  misc_feature (4215560)..(4216072): n is a, c, g, or t
  misc_feature (4384376)..(4386795): n is a, c, g, or t
  misc_feature (4389220)..(4392733): n is a, c, g, or t
  misc_feature (4395332)..(4395332): n is a, c, g, or t
tacagttctaccgtaatcctaagtccggtcaagctttttttgtcaatggtgacttgggtaaagataggttttggagagagttttgtgaaaagaaaaagtaagcttaatggacaaaagaatttcacgcagctgcttttgtcctgctttgatctattttatagttagcctgcagttctccagacatataacagaatgagggaattacatttaagatccttgtcaacgattgaaactacatatttcggaagcagactcgttttatacgttacagattgacagggagcattccattaagaggtcgaacatattggaacacgtatagacaggagccttcagtaaaccatcagaatcaagtgaacgccgtaaattggctactgatatacctctgtccaaatttcaatttcacgcaggggtaaagagcttcaacgttctttctgtcagtggtttcgatactaacaaagcgtagtgcttccagaagccttttgaaagggatttctactcatggtttacgcgcaatatatgatagagagcgtctgtcatatcttcaatcgtcagtgtgggtaaatgatgacggatcttggaagcacaaaccaggacgcgtcagttccttcgaacaagtattttggattccaaacaagacctctcgactcagagatcccttccatagatgcaaaatagcttcacacgcttgcaggtctaatccctcgaaggcagatctatagaagttctccaggcgagctgcgtcgcaacgtttgagattcgagtgtgtattttccaggtttggatggttccaagttacaaattgctcaattaatgagaaggcaggctcattagaaaagaactttttgcaatgggtggaaaacagcgggctcctagttgagagagaccctcgcgcagtattgtcgttcatagggagggggctggatcggaggagcacacaaccgttgcgcccattatgcctttgtctcctatacaatctcgtatatcagcaatcaagcatgggaataatatttacctctttccaagctctggggcacagcttgccttgacttgggccattccatccctaggaatgacttctgaatactgccaaatttgcttcctggccgtggaacccaattgtgcgattgacgagggtataataattgaagtcctggggcctgctttcttccacctgaggcaaggctggctgtgatttaccagagttggcctgcaagtactgaacagagaaattctcggccataccattttttgggtaataaacaccatttataacttcgtggattggccttaaggactctagacgtcaggcagtggtggattacctgtttcgaagggatgactgttgatactcccactgagcggatataaatggggactcggcaccggggtgctggaagtttgggaatgtacatgtggaggccagtggccattgttgtttgccatagtccaaagaatcgaagttgagatgtttcgggggcacactgcgaatgaagagggccggtcgtaccaggctggagatcaaggacgcagcgctctgggcgggagttatatacgttatgaagggtaatgaccttccatcattacgtaagagagcctttcacgcttcgccgtgttgggtggggaaacttgtgatgcatgccgtcgccctgactggctaacgagatctggggcacttcttgatttggaattctcatgagagatgagagtatttgggaataatccacaaaaaggccaggggcgctttacaacgatatttacacaaggggtgagtaggattagctactcagacacttcgctgcagcgaatatggagcatatgtagggcacgtccgtctcgatacaagcgcagtcaaaaaatgaaaattaccattttattgaaaggtattgtaatatttacatccgtgcgccgaggtatattactccattccaaaatcttaatatactaagagaaatcccccaagtagtttgtcctctcgattgtgcatacacctgtcctccccctctgcatttatcatagaaatggacggcaccaatatggtaagggcaattgtgttcgcttcttttcccatactaagattgattatacagattcccgaagccgacctcgagatatcagcccgaatatcattgacagctttgcaaatttggtggctgggtaccccagacctgaaagacgcaattaaacagcatcacaaactcgatcctgggattgcatcactagtgctggcctgtcaacgtctcaggaagaatggatacagaaagggacggatccctcttacccagaacagcattttaaatcgacatgtgcaagccatggtggatgacctcaccgaagacacgctcaaaatatttggccttctcacctgtcacttcaacgaagattttggagtgcctctcccccgtcagcttcttcgattcttcgataccccctggaagcttctcggctatcgaagctatcactcccactccaaaacctggaatatacaaagggagatccccatgcaagttgcttgccccttcgattgtgcatacacctgcccagtcctcaacctctgcacttatcatagaaaaggacggcatcgatatggtaagggcaagattgttcgcttcttttcccatactaagatttattatacactttccccaagccgacctcaagatatcagcccgaatattattaacagctttgcaaatttggtggctgggtaccccaggcctggaagacgcaatttaacggcaacgcaagctcgatcctgggattgtatcactagtattggccagtcaacgtctcaggaagagtggatacagaaagggacggatccctctaacccagaacagcattttaaatcgacatgtgcaagccatggtaaaagagcattgcggacaaacggttggtgggatatccagtagatgagcatgccgtacacttcgtcataatatgaaacatgggttgtcgaagctgctggctgtcagactcatcccatcgcaaaggaagaattacgtactgaagtagcctctcactagctcatcagcagcatcgcaatactttacttgcgttattcacgtttatgatattggccggtcaaggctttattcgtgctcaattcattagattttggttcatatgcatgaaacccatgcctgtgcaaccactaacttcgatttattttcgcgatatccaagccccaaggcccccaagcaccagaagactctctgagtggcatcaattgggtcaattttactttccctttattccctagtcataacaatccttgtgtgtataagaccatgtctgtgggtccaatccacgtcggtatgtaccttgaccagaacaatacctcaatcactaatttgcttcatagcttcaagttgctatattcagcccgaggaaggttgtgattttgatatgtggtttctgagttcaaggaaggattttattataactatttttgtacttctaggcagagctcgataataggtccagtcaatatatatttgtaaaacgaaatctttaactatgcggaacgattcattaagcttaaagaatattgatatgccattttttcattagtagaatgtttcctttgttaagaccatttcaacataaaagctcaaaatgcagtagacggagacttcggatagcctaacaatctaccattaccctccaatttgtgctgctctttcttttctacttctcattcgctctaattccaccatatctactatttttgtactgccgcttaatatgtatcccaatccaatacacagactaaaaggaaggaaagtcggattctggacggaaattcactggtggttcatacgcaatgtatagttgttcaggtcaggagcgcggtggaagatcttctggtagatctccgtgagcatacgggcatcggcgcggatggtaggtgatatatttccattttggacaaggaagccgattgtgcgtttgaggatacgctcgagatcatgttcagcgactagtttgctcaggcttgacatgtaggtcgcggagagaacaagcatgttgccaaattgcctatataacatgaaagatcattagtattgccctttagcgtccacatttctccagattagttgggtccgcatacgaatgggcagtgccaaagatattggttaccaccaaccgatgggtatctacacaatcaaaagccacagtactccgaattgcagaatcaatacagatcttacaggcatcctgtaaattttcaggcagcgcccggagttggacttcagcggcggtcgatccgttagcgagtgaggtggttggtgttttggccatgtttagagcataggtgccatgcagagcgtggtagaggaacggtcggtggataatatacagggcaccgtagtacgttgcccgcatgtgggcggcgtttatttcattggctggctcgtcggtttccttccactgcatactgtcgggcagggatctgcgccagagatccaggttttcgctcaaagctccttgggcggtatatgaccacagtgtttccccctgttttttgattttgtagaggtcggtcgggactcgattcaggattttgcgcaggtggatttgagcgtagtagaacatcatgatcatacttgggcttgtactgaagtgttctgggagactaattgtgaattgtcctttagggaggtgcatccgaccttctgaatgagagatgccactggctggaagatcaagccctgcaagtaagtcactctccaactctaggcatgcccagtatacggagctatggaggtccttcactgagccctggttgagactttcataccgctttggtcttgtcagcacctgacaagccctcgaggcttgtgaaatccaactatgactctgaaacggatgagctagctggccggcatatagtccagcaagcagccccgcctgaacgtgctccagctcgtttgcaccctgcaagtggctcaaaattcctgtagcatatctgtacagcgtaataccagggatgctttggttgttcatcgtattcgcatcttcattgcgcattgtgggcgagagtgcaccgttcgcataatctgtctcgatatgggcgggaagaggtgatgtggtgcgctggccgcggtagccgatcttcctgttcatgatagaccccgagaggggagtaggagcttcgcaaattgcacccagggccaggcatagcaatactatggaactgtgaatatttcgatccacgcgtggtcgtggcgagttgcagcaggtctccttatcctcgctgtgtataccaaggctgcgattgaagctcctccgtttcttcgacggtggctcatcgcgtgctggctgtacacagtcggtgacagagcctggagaggaattgaagtggcagtaagattgaataaacctattcaccttgttgtcgagttcattccgatcaaggaacgggtgaagcttatacatgttagagaggtagctcccaaagtaacgttgagctgcgacaccacccagcttcacgttaccaagcatatcaatatcgacgtctccgtcaaatcccactctgcacccatcaggtccgtggctacaaacgccgggatccaatggtaaggggctgttatccagagtgtccagcatctccccatgatcatacgtgctaagaagaccgcgctcctcttctaaccgtatcacataatcttcgtcgtatctgtccggtaacagctgctggatcgagggccacagcaacaaatttcgggccgcagtgtgctgaacgggggtcgaaagcgcatattcagcctcaagcttggagccgacgtgaattggattcacaaggccaagattctgaccataatttggaacagccacaccatgtcccctgaaattcaatagactcctctctgtgaggtgggttaatgtctcgtcttgtcctaggagagagacgatgttaccggaatgttcatgtgtaccctgaataggcttgtagggctggtttgggtttccttgcgcagacaacatttgattttgtagcgttcgaaattgggctgtaaagttgtcctccatcttcgtcaaatggtctagcaaagtttgagtagacctattttccttgcgtagcgactcctctttatacgagcatggcagattgctttctctgcagtagccacaatttggtcgtccctcatcacacttggcctttttagctcggcatctatcacaggcctatagctctcgatgtcagctatatctttctcagggcaaaccagccaactaacctgcgcggcccttgcagccttcgcggtcctacgctggtgcggtccataggcctggtattggccaatcaccgagccaaccatttgtggaatggatgccattatgtgcgaatgtagaacaaaaagatccggttcttgtcgggcttttggttgtatcaactttcagttaaaacggttagagaaattcaaaacaaacgagcttgctttacaaacgaacccgtctaaaatcgttcgtttgtgttcgatgtagtaagataatgtcgaataagaagtttggaactttcagctagtggttgaatctgaatgtgcaacactatcgcaggctaatatgctcgcccttgagtcaccgtagcgtattcttggactgcgtagagataactgatgagcaagctgatttccccccgtgtatttaagaaaaaggccgaaatagaaaaactaagagcaaaaactgactatcataatttacagagttgaataagtacgaatcgcacggaaataggtggctgagagcgagtgctcgtaacaccacactaaagtatccacctcatttccagacttctggttccgctccattcctccattagttcactgatcactcagctccttgattaaagtgctattcttgaccgcattaaatttccacctcaacattcaaaaccgcattcgcaatatgcacgaggtgcttttattcgatactaaatcacatttacttaatccaatggtggggtaaatataatgtcgtcctcataacccacacctaccctcatagctatctccatctctagggattaggtaaagggggattgaccgcatatccccagtcccgcaagaaatcgggcgcagcacagctgataatatgatcctcggacacttagtaccattttaaattaccactaatgcattcaaggatttaattgtcacattcctagcttttcatgatccggtgcggtctatagatcagtgaagagaggttctacccgggcgatgtgatagctgatggatgatacatgaagagcccaattcccaaccatttatcaatatagctttcaaaatccctcccacggattacttcggctcaaagcactcacgaacggctctcaaagtcattttaggtcggcagttgcaatgttccagagaaacatgccttgtcccggttggcaaaagccttgggtctttctgcgaagtgtgctgatcgatgctgggtcaggttggactaggccccttgggatacgtaatagcttggtttaatcacaacaaagttattggtggagacttttaatcatggtagcctgtagtggctttgggtctggatgttcatttctgggaaccccggccatgcaatgcgctaaaatgaaaatttcagacgtgtcaggcgactgacgccaattgattgggccataagctttgcttcagggactagatctgagcgttggtacaaaagacaagtgctagtctaactgcgatggtgctgcagtagcaccagtccggcaacactagtttctttaatactacgtgtgaccctgttataacataaatgagatttaaatacccaatgtcagttattttactccttcatcgttcttctgttgtttttgttcatggagggaattatgaccaccaaaaacccgttctcccaacaaccatcaatatctggtgacccgatggcaattagttcactcttgaatgatcaaacattatcctcgcaccagtatccacgacctagctcacacaagacgtcccagggccctggaagtgccatgtttcgggcagtcaagttgtcggcatcatccgtccaggaaaacggcacccataccaagagtctgaatttgcaagatcaagagcaggattcattttcagatcgacaagcccgttcttccaatcccatcaaatgtgggatcaccaagaacgaaactccgccccgccaccgcctgtctcagaaagtatacaataaagaagaaacgcatttcatttggttccaccgcgtcattctcagggataaatggccggatgttcttgagaaattcagccgtcaatttccaagccgaccacgccgtagctatggaggacttgaaggcaggctccgaagatttctccaggaagaaacgttgtcctcttcccaaaagaaaaatcagggctggaagtatgggggaaagggtgggcaagccatttcctatacgagtagcgagggtgttgttcatatatgcacgtacccgtggatgcaggaaactgccggtccccaatccaaagtccaaagtcattctcaaaagaattgccggtattagactatgtttgcttaaaacccaggatataccgttcaaaaattcaatagccattgacgtgttctatatacaaccatcttcagtcagcctaaaaaggaaaaggatatggtaattcatacaaggtagatttttcatcatctgacttactcataaacgtacaaaggtagcatatcataagtgatatacatttctgtcacctgctggctgatcataccaactctagacacccaagagcaatgtgtaagttatgtattgttcatccaatctaggttgagaagacgcaggtttattttcgtttctttgtccaatatccatctttgaaccgttcggccgcttgaatttcaaatactgaaggatacttctccatgtaatcctgcacaatgctcaacgattgcagaacttggatcttttcaagatactctgcgaattaaacagaggctgctctcatggcatttcgactctgacttagctcaaagaagcgactaggccatgaaacccgggtatctgatgaatcgagggagcagtgcacgttatggtgataggctgagcgatcggcaacaagagcttcggaagcaccgttagggaaaaagggaagtcgggtttccaggattgcaggatcgttcggtggtaagaatgaaaaaggtgtgacagaagattgttgacttctcgagaacaggccggaatccatgtattagcagaccggtacgtgactgaaactttatagttcttgagtcatcctggatttgtggaagggatttgtggaagtatcagtcaatttggcaattcaaacctctcgcccatgggtctagcaaaagagaccatgttggtatccatctcaggtcggattggctttgactcgacatgtctctcttgtggccgccgttggcgattccagcacattttaccccttcgacgacgcggggcttgacctgcagtgtgtcacacacaattccgttgtttttggagccagtttgaatacatttgacttccactcccatggatcttctggagagtattgtggtgaagtacatgagcttggataactcatacgacccaaaaagaacagatctcgggtgcccatgttgacacagaggaggctcccttcaatggatgcgtgagcttcgagtatactagtaaaagggctgcttcagtatatttctcaaccatgaaccgtgtatatgatggtggatgagaataaaaatgagggttggacattgccggtgagtggtttattcctccattattggagatttggggtggcacgtttttctcgctctcgggcattgtagtagtgagacctctgatcacatgtccttctacgcgagtatgtgagcgttcctattggacgataatagttggtccgagatggccgcaactgacctcaatgccttggtctgaaccttgacctattttgtgggctgcatgaagcaggtcttcgcagtggttgatcctcgttatcacgggcccacgcacgaattttagaggtaatgtcgtatttcctttcagatcgagcaggatggcacgcttatgaatggtaatactttcatcctgggacccacgacgcattattattgaatgtcaagagcacataaagtacgaagctatacctaggcattactaggggtaatatgtcataaggtcgtcagtcgatacattcccgctcacattctgatctctaatcatcgtcctcattcccttagtgataagttagaggaaaccggttcctcaagcacactcaactttcctctatccagtcttccctgactctactttccagaatgacatggctataaggcggacttatggatgcaaaatcccaagacaatccagattcaggtaacatctcggtagtggtgaacgggagtatccatgcgcatccggcgaaaactgctatggtatcatattctcgtgcttagttccttgttgccttttgctaatgaatccttaaggtacaccccatacccatccaggtcaatgccaagtcgatttcgccttccatcaaggagattcctaggggtcaggtacgtttggccacaaaattccactgagagaccttccatctccaaatgacctgttgctgacctttatttgtttacgcatgacccacagcccgcgcaggatgaagaaaccccatccagtcagcctctttccgattccaacgaactgagacacactcaggtacccataacgcgatttttggataagtgaaatagacattgacttgtaccaggcaccatcggctgtcgtgaaaagagcaacggtatcaaacacaagccccagacgacgtataccctcaaagactgcgaattcgatggagaatccatgttatccaacggaagtgcaagatctacgagtgaattacagttctaccgtaatcctaagtccggtcaagctttttttgtccacggtgacatggatatagatacgttttagagagagttttgtggaagagaaagtgtgcttaattaaaaaaagacagcaggttgcaataaaacatgggaactaagtgagggccgtaaaatggctactgatttaactctctccaaatttcaatctcacgcaggagtaaacgagtttcgacgttccttcggtcagtggcttcaatactagcaaagtgtagtgcccccagaagccgtttgaacggaagtttctctccgtggtttccacgcaatatataatagagaaagtctcccggatcgtcaatggtcaatggtgatggggcttggatgcagaaaccagaacatggcggtttctgtaaataagtattttggattccacccaagatacttagatccagaactcccatccatgcagccaaaatagcttcacacgcgaccaggttcaatcctcggaaggcagatctatagaaatcctccaggcgagctgggtcgcaacgtttgagattcgacagtgttttttccaggactgtattattttgagccacaaattgatcaatcaatgagaagtcaggctcattaggaaagacctttttgcaatgggtagaaaacagcgggctcccctggaataccgtctgcatcctgccaaatgctgccctctggccgtaaaacccaatggtgcgattgacttgggcatattcatattcctgaaaacttattgcttcgtcttgggaatatagaacgaaattcccttccgcctggagcgaggccggctgtgatttattgcagctggcctgtgggtactgaacagggaggtactgaacagggaatctctcggtcatgctctcttatttttactaattagcaccatttataacctcatggattgactttcaagaatatggatacaggcagtggtggattggtggattacctgtttcgaatggaggtttgatgatactcgcactgggtggatctgaccggggactcggttcaagggcaatggtgaaaggtgggaaatgctgatttggaggccagtggccattgttgtttgccatgattctaaagaatcgaagttgagatgtttcggaggcagattgtgaacgaagagagtcgctcgtactaggtcaaagatcaaggacgcagcgcggatgggcggggggttatatacgttgtgaaggagaatgaccctccttccttgattatgagagcctttcacgcttcgccgtgttgggtggggaaactttttatgcataccgtcgctctgactggctggctggttctggggcgcttattgatttatgatccttatgagagtattggggagaatccacaaaaaggccaggagcgctattacgaggaaatatacccaaggggtgagtaggattggctgctaggacttcgctgcggcgagtatggagcaatcgtgaactactaacgagggcacgtctgtctcgatacaagcgcagtcaaaaaatgaaaattaccattttattgaaaggtattgtaatatttacatccgtgcgccgaggtatattactccattccaaaatcttaatatactaagagaaatcccccaagtagtttgtcctctcgattgtgcatacacctgtcctccccctctgcatttatcatagaaatggacggcaccaatatggtaagggcaattgtgttcgcttcttttcccatactaagattgattatacagattcccgaagccgacctcgagatatcagcccgaatatcattgacagctttgcaaatttggtggctgggtaccccagacctgaaagacgcaattaaacagcatcacaaactcgatcctgggattgcatcactagtgctggcctgtcaacgtctcaggaagaatggatacagaaagggacggatccctcttacccagaacagcattttaaatcgacatgtgcaagccatggtggatgacctcaccgaagacacgctcaaaatatttggccttctcacctgtcacttcaacgaagattttggagtgcctctcccccgtcagcttcttcgattcttcgataccccctggaagcttctcggctatgtttgcattggctccaccccagatacacgacaatggtcaaatcggagtcaatcaaaagctttaagagaaagtttatcaacctactagggcttgtggaatattatgtggttagggggaaatgggttctgtgtatctaaaccgtcggattgtgctctcatcgttggaacaatccatcaggagctagctactctactcaacggatagcttttgctaccagattgaatgaaccaaccagaatgctgctctgcgtttgccgcaccacaaatcacacttttacctcaataatggcattctccattctgcttctccattacttgacgtcgtctgatccaaattttgacacatgtgttgaaatcactgttgatgcgtaaactgggcctgcttcatactacctctggtcatgaacgttccacaaaaaagtcatatttcttttcttgcatgcctggatgcacggaattcatatcctgacacagaaataaatgactgaatcaagcaagtacacccgggcggtccaagtttgctgcctaggctgtctccaaaagcttaaagcatgcagatgacaaaagtatcatgcctctatacaaaagcctcgttaatgctgtgggcacgctcaaacccatgtgtcaatccttaaatttcctgtcaatcgagtaaaattccttgagaattaggcaattataaagggcgaaatatcgagcacaaatcttcaagtgaacttatccgagagaccctcggccggaaatcagaaaaagagaactcaatcctccacgctctaataactagatcagagtcgacgacaggctgaaacacctccagcatggctttttcggcgaggacagacccctccgtgtccccggttattgcggtatagccgcgcatgtgatagaatatatcacaacgaataagcacttctcgtttgaccgccagagtaatctgaatgagacgacccatatcagttgccttgggccactcatcttgaagatgatcatacaacaattgccgaaaaagctgacccaattcaccgttcattgcatagtaggtcgaattttccatcatgaccaggtaaatgtaggcaggtgagagtgcgtcggtttgaagttgaccatatctctctctgcatgctgccaggatactgaggcaaggcgtcatagaatgccctcttgggtcgttcaagactatggcttcaggcctgtcagtatcgatgttgaccggatgataagtctacttactatgagagaaaggttgaaagggaagtcggaagtccatcgtaggtggctgaaatggtagcaatgaaaggaagggcccgaactgtgcgagggacttgaagaaccgaagtttggggaacgtactggcataaataagatatcctttctaagcaacacccactctcgggcacttcaagaattcccatgtgcagggaccctgcaccctggtacacgaagtcattgtttggtagttcattatataggttttcattacctcaccgtacgccgcatttgaggggtagcctcaaaatggcgccaaacccatgcaatggataaaattatccctataagtgagatcagcatgcagccattgttagttctcagacactcagtcagttatccaatgaaaggtgcatgtaatcggactccacaatggcactgctaatccgctgcaggcgaacgcagataacacggtatgaaaggccagaggcgttcccgctgcgcaatggcgctaagtctacgccacttttcagtaagacagaaatcccgagtttttgaaaggcttttgtatttgtattaggggaagtgggccgaaatactggtttttataggccaggacggcctcgaagatactgcttttagaagatccatatcacgtccgggaaatactctctccttgttcgtccggattttggatcaaacgtcccgggagcatctcgagcataacataaatactcgaccggtccaccttcccggaaccatgcttcaatatttcaacagaatccattctggatacctgctaccatgtcgttggatgaggacttctgtgtaagacaatcaactctgggtttctctgcagtcatatgctaatttatgaagtttcctttcccaagagccagtctccaagccgccgaaacgactttaattgctcaacaagtgtggcttctgggcacaagagaggtcaaacgagcaataaagcggcagcacaaacccaatgctagaactgcatccctagtattcacctgccaggccctcagaaaatatcgctacttgctcttgggaaaacgcagagccttggccaagaacaatatactgaggaactatgcgcaccgtatggcaagcaagctcactgcacgtgatttggctatgctttcccttctcgcctggcattttgattcgaaaatggtgcctctcccccggaggcttcttatattcttcgccgacccctacaagcaatttgacacagtgtgccgatctatttaccgcagctacacgaaaatgtatgtaccggatacgttggcaaacttcgagggaagcttgaggaaattgttagggttattagaacgggacgtgatcagaggcgacgcggtcttgtttacctagatttgaccctctgttgagaccttgccatatcatactagtcaatgagaaataaaaaatacagcagatatacgctgagcttcaatgaaatcacctgcctcaacaccaacttcaatcactgaatgttataccacacttcccactactttcctttactattctgatctatacctatcaaagtttgttgtgggatttgcgagccaaaattgaggttggactttttctgccgttgcctattgtgctgttagtttgtcatccgtcgacgagtttcctctgcaacataattatctcactcaatgggatctatatcttaatcacggccaacagcattgcatcggttacttctctttctgggactgtttcatcatcagcctcaatacatggggcttgtgttgcgtgaaaagactcacgacaattgtcaagtacaaactcaacagagaaacatttgtggtaagagcggcgtcctgagcgtcctggatcatcttccaagggaagatctccttcatttatcgggaatccaatggcaacccggtagcattgaaggaattcgggaaaatctttcttcgtgatcagaccaagacctctgtggatatcgtccccatcattcccttcacctccttctccttcctttcgacaatgacggtagcacgcagttgaatctggaaagagttgaaagcatcgcggacaaataaatttcaagcctgtttttaccagagctcgaagcaagattgcgagccacctttccacgtcagacatcttgaagcaaagtgatagaagcaaccaggaaacagaaggctgacaatttgacaaaagtctactctttataggcgagggccggctcgccagcgcatcttcacagatccaagcacattagtaaatgcacttgccgaatagaactagcagttgggatgcgagatagcactcctgcaaaattttgattaagatattgatacgaaaacgtttggagtgacacagcctcgactgattgtggcctttggtttaattttgttacagcataggtactagtttacagctgctcttacagcctcgcatatcaaatgtccaagtattttactggccatataattcaagttagcttcatgatgacactatctaggacatgaagctgagcggatccagggcagtctaaaagtgtggtcttcaagcaagagcttggatttggaaggctcggttgcaggccgtgttccactaggagatcccatccaatggaagatctgatcatctccgtccgtgaaacccggtagtgttcgaaccacaatttgttaagaacataaggtgattcgccaatcttctcctcactcctcccttcgtgttgaacgatgtaatacgtctccagatcttcgccgtcttctggtatgacttcgtcgagtatgcgcaacggacgagacttcgagtccaaaatttcggcagaaatagattcattggaagggccaagattcatcctcggaggctgatagctcccttctgtatcaatcgttaatggattgcccgttcgatttattaaaggagtatacaaaccttgagagttttcccgtgactgtttccttatcaccccgcagcatcgaaagagcccgaagataccaaaccaaagggtatttagtatatccatatttcgcacaagactttaggtattaagacaataaaagatataaaacttcgtagggaggctttaaaaacagtgaggtactcaattgaaggatccgcgacgtcgagaccgtatagatatgcaagattatatacccctgaatggcaccaatgtcttgtatgttaccccgacccgtcatcattggcaagagtctccagcttcggggctcctgttgtttcctgcatgaggcctatcagagtcccgtaccttggcgccatcttcgtcactgtcagtattgtccagatttagggccggccgaccggcttgcttgtgatatgggactgggacggtaagaaaactgcttttgtgacaggggtcacgcaaagtttgggatagatttattggaagagtgccaggaaagcgtctggaaagcgtccggaaagtgtcagtacagcgtcaagggagtgtcagggggtcatcaggagggcatcaggaaagtgccaggaaaacgtctggaaagcgtccggaaagtgtcagtacagcgtcaagggagtgtcagggggtcatcaggagggcatcaggaaagtgccaggaaaacgtctggaaagcgtccggaaagtgtcagtacagcgtcaagggagtgtcagggggtcatcaggagggcatcaggaaagtgccaggaaaacgtctggaaagcgtccggaaagtgtcagtacagcgtcaagggagtgtcagggggtcatcaggagggcatcaggaaagtgccaggaaaacgtctggaaagcgtccggaaagtgtcagtacagcgtcaagggagtgtcagggggtcatcaggagggcatcaggaaagtgggagagtgtcagaaaaagcaaagttttgtgttcaactgttgtaatcgggcttggcgtattttctacgttggggccatttctggacgccacattcgggtttaccgccatatagtcaaatcacggccttgctctctggagacaccggtgctcttgtcgcattagagcatgctatttcgcatgtattagttcacaggctttctctagtaatcgcgaacaagtggtacttttgttttccccgcggggctgatcaaagccctagactaattatacttgtccgcagccttgggtgctctgataacagtacttccgactgaattatgttaggccaacttatagtcaaagcggactgtgcacgttgggcaaaacatataagacgaacatggtggaaggatcagggtatgagaaaatcgcaaacaatcatcctcccagttgtactcaataccataacgtgtctcctcagccgaacattttttgattatcgggaaggttgggcccctttctattgactttaatgtccaataataacggctctacatgctgcagatgtgcaagtggaatgaattgttgttccgatgcgggcatctcgatcgatatgctttggtcgaaagacataccccgaacgcgacctgtcaaccatctaccgaaaacccgcggcaggagatcaccccaaccataggggatagcctctgccctgcgtgtaattatccatctccagctagtaccatgtccccttaggtgagtgatactgcaggttcttccctattgcttccccgatcacgagcttacaatgtgagtgtctcagttgcgattattggtaccctcagatctgtaccgaagtccgccgttgccgctgaaaattcaattgaaggttgatggggaaccgacggtgcgcaacactggcactatcagaactttgggaagctccatcaaacaagctttcacgaggagacaaggcatgtcggttatgttcacttatctactcattttcagtgggagcattatatgcgaccggatgtgtactggctttgcaatcgcacaggggggttatcgccgctccacgctcattcaataaacgtctttttgtatatttagtctactactgtagatttagtgtagtgcaatttctcaattgccaaacaaggatgttgcaaaagttgcgaattgatacatcatacggtcgtacggcagtgtaagaatttttctaagctcaatgcataaattgttgccttaaagcaacagacaacatgactaagcttcaccgcttgctttggtccgtgcacaacgcccttggttataaatgcccttgagacctgaaaacacctggtttccgagactcttgtcaactatttattccatcacgtgagctatctgaaagtgaaaggccatctctacgcttcatggagaaagtaaatcaggctgtgtccgacgcccttgaaacgcatcgttcaatccgaatcctaggtgacctgcctaccgaaaagctgaatcgtgaagactatctggcctcgactcgtgaattaatcgaaagcctcgtcgattcttggaaagaaaaggcggatttgcggcttttggcggtggaggtttggccacgacacacctactttgcactcgatttcaacaacgacgagtacaactatgacaacgcccacactcaagtggtagtcatacctgtctacctgcttcggctgtccaggaaaagccatacctggacaatctttcggcacaagccccaagactcatcgctcgccaaaagaattgcggacctacatgaaggcaatgggcaggatcccattcccttccttgaagaccacatcaaaggcgtaacacattatgcccctcggaatagcaaaacccctgttgttgcatctgagaaccctacgtgaaaaaatggcccacctccacacaatgatttagtatttgagatcctcattatcgctcgtaatgagataatcaaaagaattgaatattatggagggttgggagaaaaggttcaactattgtcgcatatacgtggatttgcttgctttggcctcgtggatggttaattaagagacccacaaaggaacttggaggattcatatagacgatgtcagtcaaatgaatatcccggcgagaaattctgcggagatggactcaacaagtaacgagaccctatcgtcagctgctgcgcaatttgcaattgtttcattcaatctgtacagatcatgaactgagccttgtacttgtaacaggggatcatctgacaagccattaacacattgaaatgaaagaaaaacgtggaaatttcgatgcacagctgggaagatggggctcggaatgctatcactgcatgtgctcaatgactacagtacacttcccatactatatacatatcgattctaggaaattttagctatggagtgtttggacgagcttactcgtgataaccaatgattgccgcacacttttgcgctagtttgagcaagccgcgctccgagactgaacctactgtaagcagtttacgtctgctcaaaaagaaaatcgtttgttttggggagtgcgtttagttggttatctaggttatagaggtcgatctgtgtaggaaatggagctggccgcgttaaatggaggaaggcgtatgattcatgcaggaaatttaaaactcaatttaacattttgatgcacgggaaggttgtatttaattgagatttgatcacttctgaatgtggggtcctggactactcgaagcgccaatactaaatatcatcatcttgacgggggcctttgtcttctgcctactttcgcgtcgaacggagtattaaacctaagtgccttagctatatggcattatgactacagttaactaactagttaaccggtatggattcgtagatgattcaatttggatggtatcggttagcttgtttgttaggtatatggaaagaaagttaacagcaggcacctgtttgaggaccttctctgtaagccctttgagattttcagcggatatatatatcgttgagagtcatggtgcatactacatccacattacgtacaagatcgcgggtacttgtattggcgacagatataaagcgacagagatgagacaccttctcgaaatagcctcaaagctggatagcgctcatggaatattcgcgacgcacatatagcaaatcaatgctatatagtccatggatcatacaaaagtcccgtagctaacccaggtccacatcattggctaccattgtctgattttagggcctgctacaccactgctcgtggtgtaggcccaggctgatctcatagtttgcttttgcggagagtatttcgcagactgaaaactagatgtacgtaggaagtctattagaccttctgccaccaccacggcggtccttgtgaaactgtgaattagagaaagaggagaacatcagaagagcgtcagtaaagcaaatcttagtaaatgttctaatgctgttatctaatctacataatggcctgagatgacatcaacaaaggcggacggtcctgttagccatcagtcatgatatgtgcctaatgaggtaggtaaaaataagtgtcttagtaaaagagtgttaatatcatatcaggctgccatttacattttatgtcgatgaaccattttgagaccagttattataatgagtcaagtcttaatcggctgcttttggatgcccgaagtttctcatttcgccctcacgtgatatcaccccccacttacctccctccttgaatgttaaagaaaatagttacacaaagcgaacctcctgtttcaataaccaagaacgaacatttgtctcttcctcttaacacccatctggaatatacaacctcccaggtcctattttgatctgtttgttttctttatcgacttcttggaatgtacctttgcttacgaaatgtagttccgcccccccctccttccccccctccttacttcgtcaccctctctgtcacatcgcaaacgaacgttttacgaggctatattttgtcgctttgttatcaatgagtatgacgcagggaagtcaagtcataagatttgacactgcagtggttcccgagaaggaggatttggaagaggtagcgagtaaattggttcggttcgtttcaatcttttccccaagagccaggctgatcgcggacttaggcgtctgaaggactggcgatcaacataaagctagagattgatgaagaaccttctcatccaagatcgttcacaacagccgacgcttcggtccgctgcgtccttgtttgtaagacggggacgatgggggctgtcaggataactggtcctggggccttttataaccttgtcactgggccggaggagactgggtgggaaattgttgcagtgaaggcagagcagacctgcatgtttattggcgatcccaccgtgcgattctttcgcacttcgcataaataatgatactgtctagtgctgcctgtgcttcataacatattgcacgaatgcagcggctagagtttgggaaaactcgatttttgcatccgtctctctagaaaggtagatggatggcagtgtgtcccccaatacgggacagtccatttgcaggtgcttctccggcccttgatattcatgcaagaagttcatcaagtcttttacttggaaatctaaaggaacagatccggggctgggtgtcaagacaggatggtagaggttcccagggactcgaggtgcaaaagaacctgtatagtattcgcttagctcatcaatttcattcggccattctcatatgattactacctgaagctgaaggccaattctgttcggcttgagggggttttggggcgtccgactgggaaagacctaggacagatagtagttgttagaatggtaagatttaatggggagcattgcttgagacctttcgaatgtttctccccgatcttctctagtactgtggttgaaaatttctctttcatgtttgcgattgtccgaggtaaactcaatcgaattatttccctagtagagcgtattgcatacttgccgaaagcgacaacacagaggaccaccaaagcattgccttgtttaggcccagaaagatctctcactttaattaggaattcttggaaactgtctgattgctctgaatgagcagacaagagtgtgaatgcttccgacacctttctagcctcgtcagtcttaaggtatcctcggaggtcgattagagacgaaattttttggagcttttccaaagcgttgtcttcaagcaatcctgcataccgaggccgtcgcctctttgcggcgaggcggggggaagatggcatcaggagagtgccaggagagtgccaggagggtgtcaggagagtgccaggagagtgccaggagagtgtcaggagagtgtcaggagagtgtcattcgcagcgaggcggggggagatggcaccaggagagtgtcagcagaggtcacgaggggctagatatacacttacataagcagcgcccgtgtgtgtaactagttaactagttaattattggccaatctgcggatgataccaatcaatgctcctgggatacaccgtaacttacaaaattgacctgccacccacctggctccggccttagtattgattagagacgagattttacttggttcaagtgtccatttatcaagtcctggccaattaggccatttaacgacgtcagtggggtaccaatatgttcatagggcaagtactatttaagtatatagaatggcagacctctcccagcaatgtccaagaaaaaggcaagcatcatatcgacaaaatggagtttgcccctcacggtacgctctccaaccactacagcattataaagctaaccaaaggacccccagatcctgataaattcttgcttggattgagaaaaatagggaagagcatctatacatgagaatttcaacaaatttagatgatctaagagcaactgctacgtcaaaaggattgtattgactatgactagcgtaaataaccgtttcttattttgctgaatcatcgggttatgctggggatttacgcatttttgggcaacagaggccaagcttctaacgaacaattcttcttccagacgcaaagctgatatgtttgatctaccatgatttcgaggagttctgagatcctgaggatgaccaggatgtgcagtcgaccggtagcaaagcggggtgtacgtggtcgcattaacaaatattcaaacgacctcggggctttgctgaaggaccatcacattcccgctatcccaagagaatctgccagatctctgggcctcatcaaaggcatagccttcagtttaaacgttcccaggagcaaccaactctcttatccctaggatactccggatgagtcctcagataagtgaccggcctctgaaaagtcagaatagccctcagaagcaagattcagtccaagacagtttcatgagtcggtattcattcgatgaagcgtttaagtgaaatcacatggtttataatagataggataggccaaaaggaatataagtttctatggcaccatacggtcatggtaccatacaaaaccgtgcctgtttcacgtatctctgaaattacagatgtcactagtattgtggcttatctgtctcaaagcggtggctgtgcaggctggacgtaaaccctgtaattaccttacatcggtagataatgagcaattgtatcgaatacgagcccagaacatcccttgactaagctgattaccgaaatggccggactacatactgccaagctatcatcaatcgagtctcaagttgtgattgcactttccgcaaatttgattttctaaggtctaatgtatcttcagatataagccacgtatatggaagtaggctgtcgcgcctttcccatatatataccgatttgctgttccaagaatattcgtccttattgtagtatttcaaagaaggtcggttaatcattctggcgggatacaagatgaagtccacctggttttttaatgagctcgttccttctaaagatagtgaagaatttattttgttgatgtggctttggtcgtgcagacccttgaataacatcaattactaagcctgtcatgtgtagtccaacagcatcgacctggcaaacataggcaatataataagataattaaccggtatgttgacttccgtgtctgcaatacgaagctgggaagtcgaggcgcagcgggttgaatgagaccttttcaatagattaacaaaccagaatgccgcatcttcgctccaatagacgagctcttcctgttttgtcgaatatcttgactcttgattaaaggacttcaggtcctacgacaggaagaagcatggtccggtaatttggagccaggggtggcaaaaggatgcctataagtcagggtggaatgatacagactaaagactggcaggcgaagctcttgataatcgtgacatagacgataatatataataattctactgtaccagctcaatagtgatgggaggtgcgggagtttattttcaagtgtattcatagcgttttcaagcgctctctttcgggtgtaacacttcacctggagccttctaggtttccgaaactttggaccatataaatctcacctaaatagagtatcggtttagaccagctttgagggaaagtctcaggtatctcacagccattggtctatatcgggttttgggaattggttgagaaaaacgggcatcatcatcaggccggttgcttggaagggcccattgttggtttaactcaatcgcgggaagcacacgagaactgactttgtcttcgcgtctggggaaatggtaagaagagctcgcgcattaaaattggggcttagtacatgtaataagaccgggggattaagcaaggatctgttttctctcggttatcagtggaccttctgaattcagtcagctacaggagccctgcaaattctcaagctccccttcatacaagactaaaagccacgtacatcctcttcttttaatcgaccaagttcatggacctctggggccatacttttgagccagttggcgaacttaaagtgtaggagggtcaatgttggtatgtctcagtcaactgaagcacacgagacttgaaagcgtccctgcgtctaggaagaagaaaagacagagcttatgtaaacataagtggattttagtaggtaggtggaattcaactgaggggttcaagcacggatcggagggaacagatctcaaggaaggtcatgttacttaatccagtcagccacaggatccatgcgtagtctctcggtaaatacaccatcgtacaagaatggagcccactaaatctttcattcgggcctttgggataatttcccattgtaggcaaaccgtcattgtcctctgcggcatcggaggaatctgcataataatgtcacataaggctttgtttgaatggaacaattgggtagggacaaacttggaataccgacgggttggaaacctatgaacagtctgagttaatccttgaggtgagataaacggcatgtctagtagtggatcagtcagccgaatgtttcaaggttgagagctccgaactttacatacgatgcagagagttctatcgtcgtatatataatatttccaaccgtgtgcaaccgttctgtcatgagtcgcacttttatgcccccaaaggaatcaggacgatctcagtccagttcgtgcatagtaccgttggccgagcgttcagtccattctctgagagtgtcctggaatccaatacctacatctccgttgccccgggttgctgaccgaagatgatattggactttatgactgagcctgctaggttccgattaacctaatactgatgacagcctccctgaagtagtgtcaatgaaagacgatcgatggcatagtactgttgttaaagccttagttgtacttttggtagctttgagtaactttgagtttttctaaagggcatagatgctccgctgcgagcttttgtgtgggtagtaggcccagtaatgttgattggttggaaaatcgtgagcgaaagaaataccaatctggagcacggttagttgatacagaatgagtgaatgaaggctgaactcactgtggtatattcaaaagcagtctttttgtttggctaagtagtttggaggcagagaaatgatgaagacctttgtttttggagcaactgactaaatatatatcccttttgaaatagcatcactttaggcagatatactaagggggaggggccgatatttagagttcctaggattcgaatgacatagctatggggcccttagaacaccttagtaggctcctgggaacgccccgcgggctcctaggagcaccatcggcgtattactgtggattgcttgtccttggcttacagattacttagcaatagcacgaaagccttcggcctgtgcgctcattggcgagagaattagttcatcatcgtcacctgctaaacactgattcctctagctgccttgatacagggaagggttctagatctttaaggaaatctatccaatcgcccttgccctggtagtagtccaaagcccgattaggggatagccgggctggtaagcgaagtattccgaggggtattcctaggagcataggctaaaatggtaaaatggtggtcaattgaatagccccactgtgagattttttacttggataggatcgagaccgctaggacgaacggccaacgttgaccgcgcccgtccttttttgatggccgatttaaatgggaagtgttgcacgtgatgggattagcgtgtcgcattttattgatgtagtttactcaggccgctcatccctacactcagtgagcactcagtgagcaaatcagagtgctcagatgatgatcagtaagtggatcagggtgctcaggggatgatcaggtgatgctcagtgagcagatcacgctgattatgtaatgatccgtgatcaaattggggtactcagggacgtgctcagttttactcagtgatcaaaaagcggcaagaggtgagcactaatacggaaagggaaaggtctcgagttccaggcattatccggtacatatgtaacattgtggaaggtttcagttctgatgatgttgtacgctaacagtagtttcacattcgatctatcaaccgaagaaatccccggaaagccataatagaaggctatatacatggaaaagtttccgcataccaattcaagaaggcatagatgatatctatgaaatgacacccaaaaagacatctaagacaactactattaacctaactagatcatgttgttcttaacagagaccacaaacgcacccgactattcttgtttgtctaatacaacatagatacggcataggcattctacttaaaatctcttgtcttaagtgacaaacggggaccctgcataggtttgaagcttcaaccgcaccccgttccaaatgaggcgctctcactggcaattaaggggtctcaggccggttgttcacatagccgaactaaggtctaagcgacccgtcgaatgggtctatcagatcgtttaatatcgtatccgaaacaggtcgctttaaatatagaccttcaaacggccctatggcaaataatggcaaacttcttgtactcccttgcaaacttcttttttaaaaatcccctgtgacacttcaaccttggaaaaaaagtattctgtaactgtccaactatcatgacgtcgctcatagtagctagcctggctgtactaggtgctctttatatgtggcgtgtcaactctgctatgaaagtagtccccgaagaggcacggaaactatcacctcatcgttggacagtcgaagaaatcaaagcagcttacaaaaagagcctagaaaaccctatcgatgtgactaagagcctgccaccaaaacaatcccgacgatatgtgatcgtaggcggaactggtaagtatacatatagatcgcttttcgatttcatttactgactttccgaactacaggcctagttggtgcttggatagtctcacatcttctcgcacggggcgaagaccacaaggcaattcgcattctagacctaatatctccagagcaggacatcctcaacaaaggcgtgggctggatcaaaaccgatatcaccgacgagctcgcagtaacaacagcattcgaagagccatgggctgccaatgtcaccaaccttgccctaacagtctaccacaccgcagccataatccgaccacaggaccgactcaagagcttcctaccacttagcagcaaagtcaacatcgacggcacacagaatatcctgaacgccgcaagagccgccggcgccacagccttcatctggacatcctcaggctccgtggccctgcaccgaccaaccttctggatcgcgccatgggcgacccagcctaagcgcgtagtccaagtaatcggcgacagcaccaaactgcccggatctcactaccaattcttcagcaactacgccgtaaccaaaaccgaagcagagggcctcgtccgcgcagcagataacccagcaacaaacttccgcaccggctgcatccgccccacgaacggtgtctatggcacaggtggccaagccaacaatgtcatcacgggcctttacctccgcaacggtggcagtccgacctgggctcgcccaatcctgcagagttttgtgcacgctgaaaacgtctcgatcgcacacctcttgtacgaacagcgtctgatccagcagagcgagcctggttcgcagctcccaaatacaggcggccaggcattcaccgttagcgaccccaacccggcgattgcatttaatgatttgtacacactactcacgacgttgtccaaaacgccgctttcattcccggaggtgcagcccttgccgttgttggtgatggcgtattttattgagatgtatactttcttgcagtttagatatctctcttggttgccgaggttgtcaggggatattgggcaacttcagccgtcgctgttttccattatcaatgttcatgtgtttgctgatgattcgcgcgcgaagctggcacctgagatgggtgggttagggtataacccgcctctaaacacactcgaaggtctgtgtcggcgccttgtggattggaatacgaaggccgaaagagagggggttgaggtcatggggaagaagatacggttgggccctgtgcaggtttcgggagatggtgtcaatgtggtcgccccggtgttgtgagggggatttgagtttgttcgatttactcgatctgagtggaggagcagacattgcaccgggttatttttttatgaacatgatatggcgtacaattaaatctgtacttgatcttaggagttcggttgtaaactggaatacgatttggcgtgaaatagaatcatatttggagataaccttagaggaactcattgaatcttctgcaacttccaaaatttggaaaagccggggccgaccagcagtacccgaccatatcacggtctcattcttcctcaatcatcattttgacacaaaagccattgttaaagccggcatggaaattgataaacctccatagatagtcgtagcttgagattgatagtgacctcgggacactctgccgaaacacaccgagaacccagtgtcgagccgtgtgggcgagcagaagtcctcggtgtaaaagcaagagcgatacacataggccactttcgaaggtattcatgggcgaagtaacaaggccatgtaaatctcaagtcgcacacatggcactccaccatgcaagcgttccatcaagcagactgtgcgaccaagaacttgaacccctcagcagcagaaggtcgctagaatgacaagcttctatttctcagaaagatagtcacgaacaagacgagagttctccttagcgagcctgttgctgagccacttgacgcatatggtcaagacgctgcatgcgcaaacgctcagatgccacctcaacatcaagaatcgccccgagacggttcttccacgtctcctccagactgactagctcgccctggatcgcctcctgtgcaatttttctctgcttgttcacctcctcagaagcctgtttcgtctctgccaactccttctcgagagaaccaagtatctcctcaagctgtgaattgccaatcagccaagcgttcttgccatgctcttctagcagagccaggttctcgtggcgcttggacaggtgcgagcttgacgaatatgccttctgcaaagtctggcgccatgcgtctaggtcgggtgcctcggtgtctgatgcgcgagtcggggcatctggtgcttcgtaacgggatagatcgattccgcctgtgagaggtgctccctgcgctttgcgcgagagttcttgttgcatcaattgagagaatttgggttccggcagttcggggatccaaggatgcattatggaggtgtgctctggggatagctctgcgttgatgagctgctgcgctcgcgcttgcgcggacgcagtgggcgccgcgtcgatatcttagaacgttagtgattgggacttcaatgcacatctcttgtccagactggatacatacatggcagcgagtcatgagattcgttgattaacggcattttgaagtggttttcttgtatggatgtcaagatcaagacctgtagattaatctgagaaccacatgaaggcggcgagcccttgagtatcgctgactcagctagtattgaactaataccacgtgaccccatcttttatatgtaccgaggcagaaacgaacaaagtaaacagttctaatttgcgaggcaattagtatatctaacgtgaatgcaccaacagcttcattcgagtcatgagataggttggttgtgtatattgctgcagcaaaaagcagggatgggaccagcatttcccctctaggaatgctctcaacgatgatcctatccagtttggattattttttacgcgaagtacctgagtctcaaggcaagcttccagcccaccggataaaaacaggcaattcaatcttcaccagcacatcttgtgcggggggagtgcagcgaaagtctattcccttttaggtgttcggatgcaatggatgacgatcgcttagacaaatgccacctaccaacctcgggagtacttcatgtacactaatgatcagcttcttcaccaggcttgggagtacttgtgtaatgattttctgcactcgtaggtcgctcgttcgtcttcccactatatcccctaccagtgccctcgtataagaacccatatctccctgggatctcaactcttcaagggctacagttactcagcgcagatttatctattattaattgtgattgtattggaatcccttctccatgatggctcactttcgcatgggcgtgacttttgttggggtgactcttgcgctgctggtgtttttgcagctgagtgcggtattcaagctcgatagccagtcgcagttgccttcgcctagctttatttcaaacttcaaccagtggagaagcagagcaagctcggcggcaactgatatctttgtggtcggagcaggcaaggcagacgtaactgggtatgtttatgcgttaattctgacatatcaatgcactgagttggctaatatgattactaggcccgttgtggagcttgctcttgctggctatgccagtttggaccaactaggcactggtttaaagcagagactgtattctcacgccttcatcttcgcagacccagataagcccgatgacacttttgtttacctggttgtcgatacacttgcgggtgacacggccgtgcgacatggtgtcctggagggtctcactgcactcggtggggagtatgcacggtacggcgaacacaacgttgcaatgacgggaacacattcgcactccgggcctggagcgtggatgaactacctgttacctcagatcccggcactaggcttcgacaagcaaagctatcaagccattgtcgacggcactattctgtcaatcgtccgtgcccatgagaacttggcgccgggtcggctctcttttggatccatcgacttgcaagacactaatacaaaccgcagtcctttttcatatgagcataatcccgaggaagaacgggcgcggtattctgccaatgttgaaaaatcgctctcgctcattcggtttgatcgcgaatccgacaataaaaccgcggctgtcctaacatggttccctgttcatggcacatctatgtacaacaataacactctggtcagtggcgataacaaaggtgttgcggcttacctcttcgagcgcagcgtccacggcgatgcgaggttcaccgaggatgccgtaattggattctctcaggcgagtgttggggacacatcccctaatatcctcggtgcttggtgcgaagacggctctggagagatgtgtcgatatgaagatagcacctgcggtggcaaaaacgaggattgccatggtcgaggtcctttcttccgcgagaacgacaatggagcgaagagctgcttcgagattgggcgccgccagtacttagcagcaaagaagctttacgaagagatggacaccacccctatcaaaattattggaggttcagccgtgaagtctttccatgtgtaccaggacatgaatggctacactttcccatcgcctttcaactctagtacgctaacgacttgctctgcggctctggggtactcgtttgccgctggaactacagacggacctggtgcctttgactttacccagaatgctactggtccagctgaacgcaaccccctgtggcaagttgcgcgtgcagttattcaccagcccagcgaagcgcagcagcagtgtcaaagtccaaaagacgtcctattggatatcggaactcttactgaaccttatgcttgggccgcggacattgtcgacatccaggtcttacgagtgggtcagctgttcctcattatatccaccagcgaagctaccacgatgtctgggcgacgctggaaggaggctattgcgaaagaagcaaaaaaccaacttttaatttccgatcctttagtggtactaggagccccatcaaacagctacgctcactacgtggcgacagaagaagagtacggcgctcagcgctacgagggcgcgtccacactctacggcccaaacacgctggcaggttatgtcaatctgacccttacatatctgccatatttgggaagttcctcaggagttgccaaactcccagccatccaacccggtcccaacccatcaatcaataccaaccgttccttgagcttcattgcaggggttgtgtatgatggagcgcccattggcaaacactttgggaatgtgacttcaaacccggggagtggaccctatggccccggagatattgtgaagacgacctttgtgggcgccaatccccgcaacaatctgcacctcgaatcgacatacgctgcggttgaaagaaaaagcgattctggcacatgggaggttgtgcgcaatgaccgtgattggaatttggtcttcatgtggaagcggaccaatgagattcttggccatagtgaggtgacaattcaatgggagattgaggatgagtattataatgtcgacactacgtcccccctgcaggctgggacctatcggatgcattattatggagactcaaagaatatttttggccaaatctcgccattcgagggcattagtgagactttcacagtgaatacttcataatctgactcattcagaatatgggtgtgtgtggcttggtggcaagttgaatgaatggtgtcaaataatctaattgccaaaatgtacaacccagtaaccaggcctcagtgattatatcttcacttacgcgcccgtacacgtagcaaatgaattagccagacactctcggtctacaaatctatctggtccatatgtcaacatggaatccttgataataataataaagtggtcctgcacctgcagccagccaatcaccacgcgccatcgatcaaggccgggcgcctactgcgacgtctctttgtcgcgcgatctatttctagcataaattcgtctcacaaagaaccccttgcaatagcggttccctctgggaatgatactactgggttgtttcagacttatccatggaaaagctcccaaggatgaacaatgggcggctgacaggaagccctaagccgacttggccagaaaccccagagtgcagatatatcagccagggtcctcgaaggcgagggctttgaaagagaaatctctttcctaataaaatctcaggttgcttcatcttgccccattcttttgtttctcttcatttttgtggtccctagtgatccagtcattctttcatctgcaagccatcaagacgcctcctaggccttgtatgcattcccattaatttcataatattttctttgggtatgcttttttatacatcggattgtctctgttttattcaggtgctctagtatatctctgattgagcacccaattctctttactgtcccactttgtcgaagtcgtgtcccggcgatcacttccaacactctcgtttctaaaccaggatgcttcgctttcagttctttttgttccttcttctgccgtggatggcttcggctggtccgatctctcgctggttgtctcggtcattggaggcatctgcgccgacttatttccccttattgccggatatcgaacggcgtcaagctggcggtatcaccgcaatcacgcctgtggcagcacctacccagcaatcgtttacgtacgacgagccaatagtacttacccttttctaaaccattaagtcaaccacctagctaaccatcacttcaaagccaactacataccatgcgtcatccacaactcataacacaaccaccagccagaggccaactacgcagcagccaactccacagcaaccaaccacgactcatagtacaactactagtcagaagccaactatgcagcaaccaactacaactcaggagccaactacaactcaggagccaactacaactcaggagccaactacaactcaggagccaactacaactcaggagccaactacaactcaggagccaactacaactcaggagccaactacaactcaggagccaactacaactcaggagccaactacaactcaggagccaactacaactcaggagccaactacaactcaggagccaactacaactcaggagccaactacaactcagaagccagtcatcacctctcatgtgtccactaccactcggcgattcatatcctcatccacaaacccgggaatgctgctttcatcaacaataattagcgtattacctgcgtatattccaggctcaacatcctctctcgattctttggtggtgccgagttcagcccaatcttcatcggctacgcttctaggtggaacaaccagcatcaaagctaccacagccacatcgccaatatcgacctctacgaccatacacccaacaatatcaccggtgcccacagtgcccgcaagtcgtagcccaacggtcggagtcattctacctctaggaggagcaagcagcagcaattattccacgttcacaccggtggtatcaacctccgattccatccaaccagcaaaggctacgcaggcatccatacagcttcttacctcagaatccaagccagtggtgaccgtaaccgagcctgtgatcgtatatgtgactcaaggagcgccagctcccttctcgacaagtgtcatccatcacgcacccggtgtcaatagttcatcggtatcattggcaaattcaacgtctgttgaaccaacaactacatctttgacgtttgtgaccatccattccactgcaacatcggttgttcgtgtcactgtttacccaacatcatcaccatcatctgcttcttcgctttcggtctcaaccgggagcacttcgagtgtgaatgcaacgccagttgttcctatgaccggtgactcgacaacactttcgcttccttcatcgtcttcgttgttgtcgtcctcctcgagtgagattgcttctgtggtaacagctcacgtcacttccacgagtgttgttcctctgactgttcacccaactacgtcgttgcctgtatcttcgttgttgccgtcctcaagtgagaatgcttctatagtgacaatccgtgtcacttccacaagtgttgtatcagtgaccgtttactcgacaacatcgccatctgctccattgttgccgtctttaagtgagactgctctgcgtgagactgcccctgttgtgacagctcatgtcacttccacaaaaacaattcgcgtgaccttgtatggtactgctacccgagcagcgaaaactacacatacagcagatcccacatctactatggatgccaatatcgctaccacaacatctaaggcaggccaaggcatacttactgtgaatccggttacgccgtctggctttatcacgatcactgagactgagacggagacaaagactaagacagtgacagatcgcattactgagactgttactgccaccgtcactcggaattaattgtatgattgggaggaaattgattcttttatccttttaattattatgcatggaggcttctttcgctgagtttttttctttcatatttcagactaatttctctaatctatgtcgaaatgttctttatagctacaagaatactaagctttattcaggctaagccataagatgacatgttctgtcctctgtacataccttagcttttgctattgtatatccaaaataaactttagagatcatgtccgatttagacccatatagatcacatcggctgtgttttatcatttctataatataggcgagtctcccaaggtcagacaaacccttgcaatcggatagtactatgagcacaaccacctctacctcgccttccacctaaccctcccaacccagatagcccagtcccgcacatcctccctctcacatatcctctcaacagtaaaccactccctagccagctcctcattactcgccatgcgatgcacgaaactatgacaagcgcgacaaagccacgccacactattcaacatccactcatcatgccaccccctcttaacgaccttcgcatgcaccccgcggggaatcaaatggtgatatgagagcgggatccagtcgcgctcgcagatctcgcacgcgtccgcgcgcgtgctcgcccatgccagcgggccagtcgtcacgctcgatgtgtactccgccagcacgggcgcgaggaagtccagcaggtctgccgcgttgggaatgatgccatagacgactaacgagtcggttacgctaacagggattagagagaatagggtttcgagcgtggcgcgtgggaggggcgtgtcggtgtcttgggggatgtagagggttgatagggttggatcgtgttggatggctgcgtagcttagggtttggagggcggttgggaaggtggtgaaggtttctgaggctaggaacttaggttgttagctttgagtcctgtcagttgttggctgtgatgtgtaggtttgttgggcctgattgctttgcgctaggttggacttggccgggtacaatgtacatcaacaaattcggcgagctcttccgggtctgcttctccctgttgagaggttgtcgctgttattacgtctttgcgcccggtgcgcttgccctttggcttccgtcgcgctggcttctgtttttcctctgaacgagccacgatggcattagacagacattcgcggaacacagcataattctcattggaagtcattgagactagccttgacctatagctcggtccggaggggatgtcgggcaagtctgttttgccccgcggaaaattgacatcattcttcagtgaccttcttcaaggctccgaacttcactgcctttgacctcgagatttatgaaacatcatgacagctaatacagccaatacagttgtcgcttttgatttatatggcactttactctcaactcaatcgatcgccaaacacttagagaaacattatgacaatgccaaggcgcagtctatctccgcgctctggaggcggtatcaactggagtacacatggagattgaacagcatgggcaagcaacacttccaggcttggcgctcaaattattgacgatcaaaaggccgctatgaagacttctcagtcatcactcgtaactccctactgcacgcgctagccgataacaacgagcagctgagcaacgacaacatcgaacgcttgatgcaagcttacgatagtctctctacattttctgacgtgaatccagctttgatcaacatcgctgcagacccaaccatccaagctgttatattctccaatgggacgaaaaccatggtaaccaactcggtgttgcgatcaaaggacctttcgccgcacgcgagtgtctgtcaagaaatcgtcaccgtagacgaagtccagcaatataagccatcaaaggcaacctacgagcacctagcgaagcagataggccaagatccgtcgcagatgagcaaactttggctggttagcggcaaccctttcgacattgtcggggcgcgcgctacaggcatgcaggctatatgggttgatcgtgttggtacaggatggaaggacgccatggctccagatctacaaccaacggccattgtacacagtctggagcaaattgtgaacgagattcatagccgtcgcctttaagctagggcatagagaacaaacttcgaacggaggtatctagacactagacaccaagagaagttgtgaaaggaatgtacagctgaatatatttccaaacgctccacacttgagtagaagagtttggggtaagccagcagatttgctctttcctcccatttcccctccagaacagtgattgtaacaaaggttcagagtgaatagggaggaattcagtttatgtgaagaagaaaaggaagagggcgctcggcgaaaaatttctcgatcaaatagtacgagcttagtcatccgactgatatcccatgggtcacgtgtgagcttcgcttatcgataaggtgcctgtccagatgcttttgaactcgtcgttggcaaggaatatttgaaccggtgaaactgcaagccatgtcgcgactcctggatcccagccgagctgcttggctttaccctcttcgggtatgtcaatttggggcctcctacgcttcaagactaacctgaacagggaatctactattttgcgtcgaatcgattcctatggcctttcttcaaggcccgccttgtcccaatcgtcctcctttcttccttcatatacttcatcctatttttcttcacctacctgccccaggttgccttccttgccatctttcagggcagctcggcatgggtgagcggcgcattcctggtgcttggtgaaggagctgcaattgttgccgccctcttcgaggcattcttcgtcgatgagaccctagtggatatattcgatgcagtgttagtaaatgagggtcaggaggagcttgttactacctcgcgggtcatttaccccgagcctggcaaccccgccaagcgtctaggcacgccgaccaccagtgccgtgtattctccattttcgttgcggcagatcgccgagtttataatcctgcttccgcttatatttattccggtggccggcacccctatgttcctaattttgactggctatcgtgccggtcccctccatcactggcgttacttccacctgctggacatgtccaagcagcagagaaaggaaaccatcagtcggcgtcagctgcagtacactacgtgggtcatgtccatttcctctgttgatatgagatctaacgcactctagctttgggacgatggctctgatccttcagctgattcctcctttctctatgctatttctgatgaccacggctgctgggtcggcactttgggcgacggatatcgaacgcaagcgacgagctatcaaccaacagtccagtcgactgggcgaacaatacagtgacgatattatgccttgacctgtgaacgatatgtctcgagattactgcaaatacatctaattttccttttctggttcctgattcagctttgatctatgccactagggaggagcaatgaatattgttaaatccaatctaattccctctccgtgattcaattcgaaacggcggacttgggaattgctttttcgagcgctgtcatggtaactccctaatgccttccgccataaaaaagacacgtccgcgccactgttcctcaccttctctcacttttccattctccctgcttctctgtcttatactcatcgctgtgcctttgcattttcgcccgctcaatcggactcaccgactacgctaccaagctggagacccacctcaaggctttgatagattgaatttacatacgcaggcgtcgaggcataagcagtagttgcaaatagttatcaatcccataactaattaaataaataataatataactaactaaccagatgtttaacatacaacataaatcggtgacgggttttcccgactaggtctagcggcgctctgcgtaggtggagccccggggagcatcggcctcaggatccatgtgtactcgactaggaaaacgggaaaacggccgtttgtcggcaatttcccaaaacctcaataagttgtgattagggagatctcttctaccctaatgttgcatcagagtggtctttcctcactccttatcttgatatccacggtaatatgattgacaggatggacctatccaaccaaccgctgccaggggggctgccctcggagatctggcttcacattttcaccatggtatgtcttgtaaaacgcaaagaaatcaataaaatgccaagctcacatcacaattcagctggattgcccctcccagtgaacaactcccgtggaaaagttatatccatcccactcatttgtgtgtgcatgtgaaaaacattgtcgtggtgcactcctatggtgtttctccttaccagtttgacttctgtgatgagtttgtggaattcctatcatacctatttagggtggcagacaatcttcagaactttcagtatgttgctttctctttcgttttgacacagcgctgatttcctttagctggtggcatgagagatatatgccaggggaaattttgtaccatctttacaaatactgtccccaagcaagtgtccacattgctagctcgaaagttgcactatgtgagaaaatcaacaaggatgattcatcggcacctcaactctcctgtatccgttcaatcgaatcagaatggtacaccggagagtatgatagaccaatcaggccaagttcagctgcaagctatccagctgaattgaaagatattatttatcgaagtaagaacctcaaaaacctcacactggttagcacgtcaaattggaggccgctttccaggacgccgcgtcatgatggcgacatctcacctcatgtcaagccgagggaacttgaagcccaaaggaatcagaggggtctcattacgttggaagaagggaatattcttcctcaagtcaaaaacattcagttccaaagtatgagatttggacctctccagagcacgttatgggccacacaatacaatggcataccatcaaacatttatccttgatcgccgtcgattggattcacttgttgcccaagatcactgctcctagctgctttcatgcgctagagactctagagataagcatttattataaaacagaccgccctgaatctatcgaacgggtggagcaattccacgactttctgaaagagcttctacctttgaaaatgtttatcgggtatggatttccacagaaaactctgggggtattggcgaaatatcacgccaaatcccttcatcacctacggtttcgatcttcattgagactcgatcttgacgggggaaaatctcctgccagcattcacaatctcgtcaatctagccgatcaactcccgaacttactatctctcggtattaatctggactggatgcccgacgatgaaatggtgagtatccccgccattattttaccattaatggaggcttcccagtcgctaatattactatagccatacgatcttctcgtcaacattgttcaacacactcatcttcaacatttagaactcaacataccaggtcttggttgttatcactctgagtggccttaccccaaccttaacgaaatgacttgtcgggcccttatcgagttctttgacgagacgtccctaaaccttctctcattacatttcgtcattggcgactgatttccttttgggcctccaccaattctacaatggtatcaggcagcgttcctggtcggcgagcgagactatgcgggtcatatgcgcttcagcaatgttcggcagtacaggcaacttcggaaaatgatacgcgaggggagttttgttccacgagtcccatcgcgccagctaaggggggactggcccactgatctacggcaggatatagaagaccgaattagcgacctcttttgtggaaagatgccgagaaaagaatcttggtagcggatatctgtcacatacatcctcactgttatcccgcgcttttcagagacaatatgcaatatcttgatgtcgaattgagatctttacctctttaccagggcacatattctaggaatgtcttatttcatagatgaattttcgatccctataaatacattatacggtcgctcacccatacttcaaggctacatttgcttcattgttttagttccttaataatcttcctacttctcctaatctatgaagtggtaggaagagcaggaacgggccttatagttcataataccacatcatcgactactcacatgtaggagatatccatggatatgcatctccattcaaagcatccgtttgatatattcatctacagtgcagatataactctcacattcttcactttgatgtaggtttaacatacgcggcatagcaaaatgtacctgattcgagagtaatgaccatcatggaacattgattatttggatttgggtctaaccaaacaatagagtagtgtacacgaaggcaaccaccacgacttcgacgaccgattcatgcactacactaacgggtgaaaatgcagctgtttctggtgtcaaaagcggtctttttcggtgtccttttcacaggtcctcatcttctcgttgcaaaaaaggtctggaatacgagtagcacgtgactgcaccacgatccgagacgtgttttcttcttttgggaatgtattcacattataatccttggactcatctcttgagagcaaaacatcataagtacttttttcatagttaccaaggcagagagttcatataccctagactttccaggccttggacaattcggagacaattcggaagtgtgaccccgtacttcgaacctttgcccgagattatcagagcctctagagcttcagctttaaagttcctggctcattccgactttcgggacggatttcggcttatagtcaaacctggagtctggatgtttggactgtctttgggccgattaaacatgacctgactggcgtggtcatcccggcaatttgctcatcgatggaccttaaaacaaggctgcgcaaggcctgcgatgcctgcagtattcggaaagtgaaggtatggttcttttgtcatgttatgcgggggaatactaatttctatgtaagtgtgatacggctgggccaccttgtcggtcgtgcgctagcttggatattccctgcacctatgaaagaccaagcaggcgccgcgggccccctaaccgccatgcagaagcgtttaagaaacaaaggcgggaacccgaagatgcagtgtcgctgagcccggcaaactatccgtcggcgacgactcccctggcggcgccattcaccaattctcaatctgcatcgctccccttatcggtagaatcgatttgttctttgcacacgatgcagatgttgctcgatgacttttttacttacattcatcctttggtcccaattccccacgagccttcttttcgagcagcctttgagcgccgagaagatgtaaccaaccacacatttttggcgcttttggcgtcaatgattggacttttagtagcttccttccctcgacgacctaaactccgactcaacaccgaagccgaacgcaccgctttccccaattctatagctctagtaaagcggtgccttgacgttgcgattcaagcccgcgggaccggatatcttgatcgcaacgccacagtctacgatgcagcaatcagctattttctcggtgtatgtgctgggtatatttacaacatgcgtcgatgccgtgtgtacctgtcggaatgccgagccatgctccaagtgtatgatctataccggtctccgaccaccaccaaccgcccgtcctcgacattaggacccctcagcccactatcgtcggccttactaatggtgcaggatccaccagcacataatttcacggaaagccaaggcgtcgacctcatcacccaagagctcggccggcgtctgttctatgtcaccttagtcggatatcagacattgcatcagatgggctcttcagatatcaaggttcatgttcctccagagacaccaacggaccgttacccaccactcccgctggagatcgatgatgaatttttattctcaacacatgttgagccgcagccgtccgaccgagtctcacggctagtcgggttcaatgcaaatgttcgcgtctacagctcatataccgccctgctagcttgggaaatagcgtttggcaacggtcaaatctttgattgggagcaccagcgcaactgtatttgggactgtctcaagaaagcaaaatctgcactaatcaatgttcctgctgagttgtctctccaccatccgaagcacacatccccgacatgtttgtcaggtctcggcggcgatgacacaatcttcagctactctaatgatcatatccaccaagaacgacgtgctatacagtatgagatccagaaagccaatatctacgctagtcagttatgcaccaggtcctatctggtcgagaagtactggaaccttttcgagacattttcaaagtatggaaagtcaccgaaattcatgacaccgggcagcaccacgccagatatcaaaaccgaaggaagacccaattcagtaccgagtgcgagtgcgactcccactggtacagccccatcagaaaccaacactcaagctcaacatgcacaaacagactttattagtcgcatgatggctgaagagcgcaaactggtcatcaaagaccttttcgtgctattacgaacagtgaacgaagtgaatatggagccgaacggcgcaagcattgtatgtcccgtttactctaaacatcactatctatcattgtatcacgctaacaaaaggagtctgattacagaccaataaaatccgccaagtagcatccaccctcctcggcctttcacaccgaccgaataaatccaacactgaaatccccaaacccacaaccgctgcggcaccatcaccatcaccaacgaccgtgcctccaggcctccacgtcctcaccgacgcagaggcggagacctaccttcacgcatttatcgagacgcttgtccgactggaatgccattcttccatgggcgatgcagctagtcctgccgacggcgtcaatccacagatgaacggtcgcgctatgagctatctgagtgattatgagcgcgaccaagaagaattgagccagtgggcgagtttgaaggagtatcagcagaagtttgcggaggctggtggtgttttgtatcagctgtagcgtttccagcatcttcttggtggtctttcttcctcaatattcgtgcattactttgggataggaaggtcagggttctggcgttggatcacgaatggatattatatcattcgcagatatggatatatcaatggacttaggtttggtatacttcaaatatagcgtctctcatctcgagacagctaagtattcataattctatttcggtcccgcgcgagtctagcaaagcggcgactatggtccaagcatgttaaattcctacgttgtcaatggggccgcatgagcagccgactaattttgttgagaaaagcaatgaatggcattccggtcattcggccatgatatttgagtacttacacatgcgctgcaacagcaacaccttccctaattacattgattgtatgctttttcttccggtccctatagatagggatgcaacaacgcccagaccatgcaagtcaaccaaccatgtcgagagaaaaggaaaatataatacaaaatttgaatcaagatcataggggaatggagagtgtgagatgatacaaacaaataatacaagcggtcatcacgaccgcacagatttttgagatcacggagcgagtatctcacagatagcgcttctcggagatctcttcgtagcactggacatggtcaccaggtgcgaaatctgtccaattttcgaaagcgataccacattctgtgtctttgcgcatttcgatgacgtctttcttgacgttcttgagggaaaccattgcgcctgttgtggaaagttagttttgatccggaatattcgtgttgagctgcttgtgatatgcttaccatcgtagactatctcctccccgcggagcaccctgaccttgcgagtcttgttgatcagaccgttacgcacacgacttccagcaatagctgtcttttcacgtcccttgacagtgatctcgaacacctgctggatctcggcttctccggtcacacgcatagtgaccgttggaggtagcttttcactgagaatggccttgacgtcatcaatcagtttataaataatgttgtgatccagaatctcgacgttctcagcctctgccatacgcatgatattaggatcaatggcctggttgaatgagatgatcttgcccttcgcactgccagcatgttcgatatcgaattcactgacagggccaacacccgaacggatgatattggcaaagacttcgttggtaccgactgctgcaacggagttcaaaaccgcttctaccgaaccgtccacatcgcccttcaggatgaaattgaccgacttagggccggtaggttcgacatcctgtgttgtttcttcctcttctcgctctcgcctgcgcttctcgacaagttcacgacgagcctcgtttatggcaatcatatcgacacccatcttctgggtatcagatctctccaagcggtaatctacaacgtccttggctttctgctcagttggtgcctgtaggagctcggtgccagcacctggctgctctctccaaccatcgatttcgacgggcattccaggcgtggcttcactgatagtcacaccggcttgattgcggagggtgcggacacgagcccacgcggtaccggcaataatgatatcgcctggccgcagggttccacgtcgaatcagagcagatgctacacggccataactctttgtagaggcctcgatgatccagccttccacgttacagacggtggatgcgcggtggtcgagcatttcagagagcgcgacgatggcttcttccagttcgagcattccctgtccggttttgccgctgacaccgatcgcctgaacgtcacctccataatcttccacatggacaccatgaatagaaaggtcagccttgactcgatcagggttgttgccctccttgtcaattttgctgatggcgacaatgacgggaaccttggcttgggtggcgtgtttgatggcttcgatagtttgtggtttgacactgtcgtccgcggcaacaacaagcaccacaatatcggtcacgtcggcaccccggcgacgcatttccaaaaatgcagaatggccgggggtatcaaggaaggtgatggcttttccggaaggcatcgttacggagaatgcgccaatatgttgcgtgataccaccatgttcagacgctgctacagatgacttgcgcagccaatccaaaatcgtagttttgccgtgatcaacgtgacccataatagtgaccacaggtggtcgagttggcagatttgatgtgtcctcaagttcaggcgcagcgtgtagatctgccttgccgctgtcgaagatagcctcgtagttgaactcggctgccaccaatccggcagtttctgcatcgagaacatctctgtacgtgatttcctcgaagcccatctcctccattcgctgcacaaattgcgctggccgcacgccaatgacatcggccaagttgctaacactgatgaattcaggtaagtagagaggagccggtgctgccagcgcggcggccttctttgcagccctttgggcgtccttttctttctgctggcgtcttcgctctctgcggaggcgctcgcgatcttccgagtcaaagtcggccccatcagactcactctcacgtcccttgcgtccatcacggcgcttcataggctttggcggtggcggctgttcttgcgcctctagcttctctagctgctccagtgcagacatatcccaagtccattggttcttcttgaaattgtctgcttcctcctttgtttgaggtcggtcaaattcctctgaatcgcgttctgtgtttcttgttgtattcagcttaacgtcttgttccaactcagacaagactgagtcccctaattgctggaactttctagtatactcagggggggatctggactcttgaaattgtgaacgtccgggagaatcgctatactctctagttattcgggaccttggctgggcgtcggcaggtcgagaggttttgcagaatggacacacttgctttgtggcaaaaacatgtttcatgcactgagggcagttccagtcgtcgtgggccattggatggtccctagttgctttgttctgaaattggccctgggatctgttttgtgtcttctcaggagcaaacgggttctcttcttcattcgccgctttcgttgctcggatagacgggttcctctcctgattgcgcgaggtccccttgggccacctcatgtagccacctccattctctttttcaaacggggctctctctggagtggatgggttcctctcctgatcccgtgaagttcctttgggccacttcatgtagctacctggattttcttctttaaacggattcttctcttgagtggacgggttcgtcccctgattccgtggggtttctcttgaccacttcatgtggctacctggagtttcttctccaaaaggattattctcctgggtggacgagttcatctcttgattccttggtgtctctcttgatcctatcatgtaggcatcttgattatcccgagggcccacgcgccgcacgttcggtttcctctgctggtttgattgcgctgagttccattgctgatttgactgttcccgcctccgttgtggtagtgtaggcgcgggtgcaggtcctggcggcggcggttgactattggcgacaagggttcggcgcagcgcttgttctgcgaaactcaagcccgccgatggcgtagtttgtttcgggccccatcggctgccaaacttgggcttttccggcgctggatttgagggactactatcataattcccattcgatgcatccgatgagttcaaacatgtcgccgataaccgtaaggtccgtcgaactgtgagagctgttaaagtaggcgttcggtaggctgaattcgaccattcagcccgacgcgatagctgtaggtttagttagatactgccgcaacacttaagagctgcgaacttaccctgcagactggccgacgatgcatcattcactagtctatccacatctggatccgtcaacttttttccctttccagaagttcggaatgagcttatgtcattgattaggtcagctggtgggtatcaacccgcttatgtaacatgtccgccggtaaagtcacatgcctcggcattattatccaatcagaggtcagatggcgccattgcgataagcgggctggatataaagtctggagtctccgcattgtgtgcctgtctatacttttagtcgttgcggttcagttgtttgagacatggagactgaggtaattgacagtatcgataagggcggcggtggtgcccttcgcaccatcaaggatttggccgcaggcgcggcgggtggaatagcccaggttctcctcggtatgtgtacaccgtactttctttgaattccgggggaaagccaggggcgtcatgagatgagaatcttgccatgactgtgtctcgcggggaatgatccagacatgcaaaaccaaagcaattgctaacaagaaactaggtcaaccctttggtatgtgatctgcctaaagcacatcttaggagacattgcttaacaatccggcagatatcgtcaaggtgcgcctgcaaactaccactcaatacaagagtgcgctagagtgcgcaacccagatcttcaagaaggaaggtcccacggccttctataagggcacactgaccccgcttatcggcatcggtgcttgcgtgagttgccccgcggccaaggtccactatagacaaatcctctaaccaactcaggtgtctgttcaattcggcgcctatcacgaagctcgtcgtcgcttggaagagctgaacaagaagaaatacgccgactcaaccctttcatacactcagtactacctggccggttcattcgccggtctcaccaactccgtgttgtcaggcccaattgagcatgtgcgtattcgcctgcaggcacagcctcacggtgctggtcgtctgtactcaggccctatcgactgcgtgagcaagctggccgcacagggcggtgccctccgcggtatttaccgcggccaggtggttactctcctccgtgaggctcaggcttacggtgcctggttcatggcctttgagttcatgatgaaccaggacgccaagcgtaacaatgtcaagcgtgaggatctctctaagggaaagattgccatttacggtggcctggctggtgaactcctctggctctccagctacccgttcgatgttatcaagagtaagatgcagaccgatggattcggcgcgcagcaaaagttcagcaacatgcgcgactgcttcaagaagacttatgccattgagggtctcggtggtttctggaagggtattggccctactctgctgagagctatgcctgtttctgctggaacattcctgacgtatgtttgccctttctttgctcgctcatgatgcttgtgtttctaatattgccgctaacccttcgccccagtgtcgagttggccatgcaggcactcggttaaaggccccgtaagggtatgttctaatgatgaaagttgacgcatttggtttttggtcggtttcacttgaattctttgatatccagggcttgttcaatatcctacggttggatggaggtccactacaaaagtgaatggcatttcaaagcttatagagatctatatccatgtcttacattgagcgattgtgagattatatatacctatacagtgtttccaatatacagaatttggttttctatatttctagtgtgaagtccctaaaggcttctccccaagaaattcctgctaagcagtagggaaatgacccaagttcaagctaggaaagtcctctctaacatagaccacagaagatctgcctctgtatcgaacaattggacatttagcctaggcaaggcccattgcatatttcagcctggtcagatatatatccaagtcaaccctacgagtctccggctttggtcatctacaccccccatgtattccgtgggactcgtcaaatggctatgagggccacgacttcaggaacacccacgagaaagcccggtttgatatttgttgctgacctacatggacttccacaacatggtaatgttgatgtccctgtggtaggtgaggcagcaggtgctacgggaccctctgcctacgctgtctcatcggggctacggtgagatggtggttgaaggggatggggagaagagaagaagaagaagaagaggaggaagggtgggaggggtccttttatacccctaacaacgcgtaccttcccaaatggacactctccaacgcaccttcctggaatcacaaatgtcacatgtcttctaactttggaagccaatgacaatacgccatacctgcccacacctgggcaggattgtttgttcggtgatggttacatcactttatgaccttcatgtccatttgttgtatagtatagcacttcgaagttcggtggttcggtggtggatactctatgagtccttgaagtcacaaaacaatatgtcggcacgtgggctatcttgaataaattgaaagcagcaagcagtggagatacgtattaatacaggttcggtcttcgtctcatggctcttgattgcatatatatctgatggagagaagaagaaggttgatatttgttcaacgcctgaggcatccatgcctaggcaggcaaaccctgatgtcatttgtccaggtcatcgtcaacttttcttgctttaaccttcccaagtacaacaactatgctccgtggtgatatttccatgtgccggtgaattgttgtgtatttcaaaatatatcacttcatttccctctactcaaatctcgccctatgcttacgacgatgtccaccgcgcgacctgtcaccctcctctcagctgttctcctcatataccctgcgacattattactcgggtctttgttttcagcaatctctccaacagcgcgacactccagagatttgtccgactctttcccacagcctgcaggccctctggctccatccctggcttcagacctatacctatccgacggccccgttaactacttcgcccgaaagaataatatcttcaatgtctacttcgtaaagattggatggctatggaccacagccgcctttgcctcgcttctcatattccaacccctttatgcttcgtctcaccgggaatccctctcacagcaagaagcacgtttccgacgcaccctccaagccattctacgatacacactcgcgacaacagtatggtatcttgcaacgcaatggttcttcgggccgccagtcattgatcgcagtttcgtggccacgggcggcaaatgcgaacaggctatcgaggaagtcgggaggatagccgctgggcagagtagcgcaacgggcctagacgcgctattcacagcaacgacgtgcaaagccgccggtggcgcatggaggggtggacatgatatcagtggacatgtgttgatgctggttctggccacaggagtcctggcatttgaggctgtcggggccagcgcatgcgcacccgcatgtttgtcgcgttctgatcctggggacgcgggacgtgaacgcaaggccagtgatgctgatagtactccaataatcgattcaattgagactgccgggttcgcaagaacgtggtcgctccgtcttgtttggggtattattgccatgggctggtggatgctcctcatgaccgcgatttggtttcacacttggctagaaagggtatgtgcattcttcggcaaaatcctacacgataaaattctaaatttgctaatgattcctctagtggtctggtctgttgattggtttgggagctgtgtatgccatctatattcttccaagacggatagcaccattggggaacgtaattggacatccgggagtatagacgtctgttttgcctgcgagattaaattctcagcagctgcgagtatatcgaatgataatgatagattgcattgattctgggcatcgagaaatgctcaagtcgtctaccgtcagacctgtattgtacatagagtaataagcctggcatatatatagacatagctagttacgaagtccttttcttcaaaatatcttcgatatccttctacatatccaccagaattctgacctaaggatggaaatgttgtagtactgctagggtgttggtgttggttcctttcccaggtatccagctcgaaatgctgggattgaggagcgtgtcaaaataccgaactcatcataggtgacaggtgacatttgagagatcatttgacttacctcctggaatcaatgctgccgcatacatcacccgcgtgataggcctcaagtcctctggtgtcagatcatcggttatggatagtttcatgtatggatcccaagcagcaatgatggcatcggagtagcatttcaaatcaccagagcattcttttttcgcattcacccgtggctggcattggatgcctatgcaggtcccaaactcacgaaaggccagccgaaatcggatattgcgctccaaatactgattgatttcgaacagattgtctgaaagaacccctagtcagcttgattcttattgtcatgtcctttcgtggatatcgacggaaagatgactgacatatttgatcgaagcatttccccgccaggtcagcagcccagctctctcgctcggaaaaccaatgtgccgtccataaagtcataccaagatccaggggatcacttgatacaaagtgctctccttttcgctccatcgtgcgtctgtagtcgtcgatctcctcggtcaacaccgcaccatcacctgcttctatggctgtatcttgcaggagtcggaaaataacaaagccatcaatcggatcaagattaccttctgacttgaccattggctctgacaagtccatgctcattttccatatcattcttggtcgagctgccgcgcgatcaacaaagaactttgggtgtatcgctttcgccagctctatggcttgtctgttgtacttcaaatctcccgatgctttggccatccggttcaatgcgaacatccaaaccgttaggtaatgatgatattgcccatcaccatctggaccgtgagcatctgtcttgccgatcctcaatccaccgcttagcgggttctcgtctgttgctcctcgcagtcttgagtggccatctcgatttctacctaggatgtcatggacagtctcaatcaaacgaccagccaacaccagataacggtcgtcaccaacaatgtcattgtcacttcgcttatactggctgtgcattgtgagaaagttgataaccccgaaggcatctgtccataggtatcgcccccgatgaccacctgatcttggtggtggagtccaggattttggatcttcgatgctgctaaaacttccgtaaagagattccatggcttgtccaaagcggtctatgcgcggtgacgggctgctgattggcagagccattctcgaggtatgggtatgtgccttcgaaatgggatgggcatatgcgtagctgcggggatgaataattgcttgtctagcagtgtgctgactggaaaagagcaacttgaaccactgcatttgttatcgattctcattctcagatgtcatttgttccactatcgccggaattagagcattttggttcgccatcgacgatgaagtcatgaagtcatgatgattgtttaacagccgggatgtgaataattcgctgggaaaaatcccgcaaaacaaagggcatatgttatattgatgaaagaagaatcgacatgcggtgggttatgtccggcatttcagtactcgacatattcatttattccgcgtaaagatatccccaaccacagcctaaccgttcatgcgcttggcatctatactccgaactacgaaaaggatgcctcaattacaagagcttttcaattcagcagtgcagcccctgcctgcaatcgaggataagagttttgcatcacacttcgatacctttgcgggtagccaagtgattctgctaggcgatggcagccatggaacatctgagttctattctgcacgtgcagagatcacaaagcgactcattgaacgacatggctacaccatggtcgcggtcgaagcagactggccagatgcagaggccatcgaccgatatgtgcgcttacgtccaggccccaaagcgcaaattggagggagcgcgaaaggatacgaagcattcactcgctttcctacctggatgtggaagaattatgagatgcaagggctagttgaatggatgcgtaatcgaaacaaggatctcccaccagaacaaagagccgggttctacgggttggacctgtacagcatgggtgcctcgatcgccgctgtgatcaactatttagaccaggtggacccacaggcaagcaagctagcacgccagcggtatgggtgcttggagccttgggtggatgatcccacttcatatggtctggcatcccttcagggattggaagactgcgaaggtccagtgatgaaaatactcacagaccttttggcccgaaggcttgagtacatcggcttgtgggatggcgatgaaaaccacagcgccgaacagaatgctcacctagttcgtgatgcggaacagtattacagggcgatgtactacagctcagcaagctcatggaacctgcgcgacatgcacatgttcgaaaccttagtccgcctgttaaagtacaacgagggagagaaagctattgtgtgggcccataattcgcatgtcggagatgcgcgctatacaagcatgggatttcgccgcaaggagctcaatatcgggcaactatgccgtgagcgactaggacgcgagaatgtgaccattcttggatgcggaacccacactggcacagttgccgcggcccatgagtgggacgatgatatggaggtcatgtccgtccgtccctcccgagaggatagttgggagattgtggcccatgatactggtgtgccacgattcgtgctcgacctgcgtcaggatcgcatagacccctctctgcgctcagctatcgctgctgagcaacgcctgcagcgcttcattggtgtcatctaccgccctgataccgagcgtgcctcccactactcgcaaaccttcctccacaagcagtttgatgcttatatctggtttgataggaccaaggctgttcaacccttggaagtaatgcagccccagacgccgcttggaaagagcgaaacctatccatttggactctagtactagtatatttctacctcaaaagcaacgagttattatcagtatctctcatttttctctcattgtagacggattaagttcttcctgcatataagtttcgcacttccggtgccgtttcctgcatatgcagcacaagtgcatgaatcacatcgcttagcacattgcaaagaccaggttcggagatttcccaaaaaggatgagaactgcaaaccttggaagtacgtacatacaaactttgtatagccgaaaacggacaaccgggccggatcaaatcaatcagatcaatcagataaggcggatcaaccataacgagtgggtcggtggatgtaaatcttgtgcttggtccctttaaaaaatccctgactggctctctcattggcctcaaggatcgcctgacctaccgacctcgggaatacatgctccatacaagaaacgaaatttcgatcatcggtggccagtacattttctgactagcttgtgtttagctcgtctccctagccaatctactccgtgctctaggtattttcccggtatggtgaaattttcgtttacacctactgtgctgcagtataaaaccggtgtcgaggaaactagcccccgaagccgtacgttttctttagttttcagactttgctgtcataagttcaggctcttcccatgactcaggatcccatttttcaaatttcaacggaggatttcaagtttgaaccgagattttaggtctgactgtcgaaaccatgggtgtgagaaagcgcttcgtcaacccatttgcacgcacggcatcctctgaggaggtacaaacgactgatgcccctgacctaaaggctcacgccgactccaaatttgccttggaaaacttggatcagaccgatcgggcctcgtcggacgtcgaagttgttgatcaaaaagcgcaggctggtactcagaaagcccaggcaagcacccaagcctggacaaagaacacattgattgcagcctatgttctgtaagttccatctggtgccgaccccccaaggaacttctttagctaacaaattaaagcgtctgggtcgtcaactttttagaatacttcagttctggactgctcagttccctatccccatatatctatagcggtttcgagctacactccttaacgggtctcacttctgtcatcgcttcgttgatctccgctctggtgaagttcccctacgcgaaacttatggatgtttggggtcgacctcaggcctttgcagtcggtgttggatctctgactctcggactagtcatgatggcagcctgcaagaatgtacaaacatattgtgctgctcaggtgttctaccagactgggttcagcatgatcgatttctctatgaccatcttcattgccgatactacggctttgaagaaccgggctttctggattgcttatgccgcttctccatatctcatcacgccttgggtctacggttacgctgcgaaccagatcgttgccccggacggcatcgggtatcgatggggctttggtatctttgccatcatcatgcccgttatcagtgctccgctctggggtctgtggtattatacccagaaaaaggccgaaaagatgaacttgacggagaagaagaacagtggacgaactctctggcagtccatcgtctactactgcattgagtttgatgttattggtctgcttatcatcgccacaggcttttctctcttcctgttgtcattcaacctatactcctatcaacgtggagaatggcattccccgatgatcatctgtttcgtggttattggcttttgtttgattatcgcgttcacgttctgggagagatactttgcgccagtgaagttcatgccctgggagctaatccaaaaccggactgtcttcttcaccttctccatggtggtatctctgtatttggcttggtacatctgggatagctacttctattccctcttgcaggtgatgttcaaccaaaccgtcacgcaagcaacctatatctccaacatttacaccatgggctcgtgcttctggtgccttgtcttcggagccatccttcgctaccagggccgcctgaagtggtgggccatctgcttcggtgttcctcttaccatccttggggttggcctcatgatcaaattccgccaacccgattcgaacattggatacatcgtgatgtgccagatcttcgttgcattcggtggtggcaccctcgtcatctgcgagcagatgactgtcatggctgtttcttcccagagaaacattccggctattttggctatcgagggtgtcgttgctagtatcggtagcgccctcggaggtactgtcgctgtcgctatgtggactggtattttccctgtcaagttaaaggagctcctcccggcttctgcacaggcgaacttgactaccatttacggctccttggttgtccagcagtcctacgccaaaggcacagctactcgcgatgctattgaccatgcgtatggtgagacccagcgactcatgctcattaccgctacttgtctttatattataacgtggacttcatgcttcttctggaaggatctcaatgtcaagaagatgaaacagcaggtgcatggtgttcacctgtgaatggtgtgtgcgccatgttagccgtgtaactacggcgcggtatagcagcacattggacaacaggaattcattggctaagcatatttatgtcgttgactctcctctcttcgtatacttcattagagatataatatcaagaatcttgtattttcctcggtactagtgacctggcaaagatttatttataaggctcaattgttgcgaatagagtcaggagatgcaaacatttatgtgttctatagtggttctcgaaattggcttgacgcacactgtaactctttttctgccaaggccttaaatttgtagggctaatttacactggtgacagcattgatgctattgacattgtggtcaaacctgttgtcatctggatctttccagaaaagttctagatcattttcatccgcctcttcattcacaatcctgccatttggaatacgaggatcaacgccttgaaaaatctttagtcctggtaatttagcatctttctcacgtgccagctgctcaatttgggcattgacatctagatcagattgggagactttgagtcaagctgcttcttgccatctcctgcacctcgagctagatagcatagcgtatgggcttcaatactgagatgcttgagctgcgaaaagtctttcagggagacgcgtacgggtgcgatttctagggcgactagctcctgcagctcgtctgcccattgctcctcataaccttttcggtcgtcttcggtcatcctatcttcttgacaggattgatattcctcatcatatgattcttgccgagatgtctcgctctccatatccaaattcaattcgtctaaagtctggcggtgtgtccaaagggacttgaatatcggagtcacgtataacgaggggttgccaccctcagggtataaacgaccaccgatagtggaagtaaaacttttcaaggccttggcggattcgatgatacggcaaagatcccagctttccattatagaatgtgtaaagctgatcttgctatagttggcggaacggggaggtggtattccggcttcattgctccacgttaccagcttaaaagcgaccgattcaatagccggtagtttacggaccatatcaagccgatgataatatgggtcttcaacgtactcattgaattcgttaagcttatcgtctgggtggaagttaatatttcgtagattttggcagtaagataccgattctgtggacgtagaggcctgatatagtaatgtttggagaagattcaccctttcatgattcctagcagatgaaaatcaaatgtattccagtaatggatacattgaaatgaattcaagattcggggcagctgcaactaagagcgtaatcagggcatctttaaactgaagttcttccgtgcttgaatcagatctatattactagtaagcaacaagcgtagcactccctgggatattctttgatagagataaaagctactggaattcagcaaggtttcgtgaaagcatagataaaattgactcgcgctcctgtgcatcttggaagccggcgcctaggattgcttgcttgagcctgtcgatgtccttaggggaaagtatagaatctcgaatggaattcttggattcaggatcaaatcaatcattccagttccgtacaggtccacacgccgaagataatctccaaggagggcagttcgtaagatggcaagtaatgtgtctggtccagcttggagtacagcttcatgggtctgcgggtacttctctcggccgaacttcaatcgatgatatttctcgcgatttttcagatcacatagagcatgtattccacggctttgttgtggcaaggccatgacgttgtataccaaaagattgttgatcacattgagcagcaattcatcgggaaaattctgcagggacggcatttttgcccgtatagcgacattgcgtcgaatcaaggcctcgggaaagcacagaattcggaacatgtgggcgtcagttgaaggaaagcagattcactacgatgtcggtcgatcaatgggcccaggcaccaaccaggcacaacccgagtcacaggtggcagtaaacgggtcgtgcgtaggctttgttgcacgtgacgccaagaccgaccacgatgagcgagcggcttaaaacagcgtcaaaagtggccgtttctggcatcccattcaccgtgtcatcctcaatgttaccttgttgttgtaggactatgtattcgatggtcataaaccatagttcccacaaaaggtgttattcaatatataacatgcgatatttggagtattacgatagacaaatctccgatagaactatagatgtaataattttctaggtaaaaacctaaccaaggcgactgcgtatcaatgattatggcgcagtggctggccttcttgagctagtcgctgatatttgactgcctttcgcagaaccataccatggctcagttgatcagtttcctggcggaagatctcctgccacggagtaccactagggacaatggggtatcccttggtacccaatgctttccttcgttgttcgatctcatcatcggtaatgagcatatcaacccgccgtttgcgcaagtcaattcgaagcctgtccccatctttcaaaatagcaagattgcctccagctgcggcctcgggactagcattcaaaatagaaggtgacccagatgttcccgattgtctaccatccccgatgcagaaaagtccatcgataccctctttcaagagtcgggctggcggatgcatattgacgacctccgctgctccaggatatccgattgggccaacaccgcgcataacgaggatggtcttctcgtcgatgtatggcgtattctccaggcgatgttcgtaatcttcgggtccatcaaacaccacaacagacccttcaaatgcctccaggtcatcggggttggagaggtatcgcttccggaatgcgggtgaaatgacacatgtcttcatgattgcagagtcgaagaggttacccttcaagtgagcgaatccggcatctttcatcaatggatcgtcatatggtttaatgacacgccgatcccatgtatgcttcccacggacattctcggcaatggttttgccattgcaagtgagcacatcgccgttcagctttccctggtctaatagctcagccatgatagccggcaggcctccagcgcggtaatattcttcaccgagatattcacccgaaggctgcatattcaacaacagcgggatggtagatccgatggtatcccaatcatccatggacacctctacgcctgtgtgctgcgcgatggcgttgatgtgaataggagcattcgtgctgccgccgattgcggcgtttgctacaatggcattctcgaaggcttcgcgtgtcatgatatcacaaggcttccggtctgcctctaccatttccacgatccgtttgccagtttcgtaggcacactgagctctgtgacggtaggcagcggggatggcggctgacccggggagggccattcccaaggactctgcgagagcattcatcgtcgaggcagttcccattgtgttgcagtggccaactgatggagttctgagtttgagttagattccggtgtcatcaatcggggttttggagatggcataccctcgggcaatgtaatccataaactcattttcgtcaatgtcacccgtcgcgtaaagctctcgcccatgccacaatacagtgcctgctccggtcaaagcctccttggagtaaccattgagcataggtcccacgttcatgcagatagcagggatattctagaaacatcagcatagatctaggaatccctcgagtctgatacccaccattgtagccgcagccatcaaacaagccggggttgtcttgtcacaaccagtaagcaacacaacaccatcaaggaaataccccgtcaagatctccaccaagccaagatacgccaggttacgatcaagggtagcagtgggccgtctcgaggtctcctggataggatgtgtgggaaactcaaatggaatacctccagcagtccgaataccttcacgaacacgcttggatagctcaatatgatggcgattgcaaggtgcaatatccgagcccgtctgagcaattccaatcatcggcttaccagacatgagttcttctttggtgataccgtagttgaagtaccgctccatgtagacagctgtcatgccggggttggtgcggcagtcgaaccatgcggacgaacgaagtgttcgtccaggttgtttgacggggacttgagcattgtctgcctggcttttgactcccatgcgcatttctagttcctggttgcgtcgtcgcagggcctgcaactcactcagacagtcctcgatgttgattgcttgaggttgagcgtcattgctgcatgaacagccttcacaggacttcttgtcagaacacgccatgatgttatagatgcactatcgattgaggtaatgttataaaacatttcgatgtgaggggagacaatggattatatatggcaggcttcccatttgtgcttccttgaaaaatgcggagtacagtcgggagacactttccgagacatttgacgtcgaatcattggaatcgtactcgggacaatttgttgaaatgccccgcgtgatcacggagatgagccgagattttgcctctcgggatgtgactacccggatattggtctcttagatatatgatgttaattttccattgatgtaatttccaataactctctgcatcaatttatcgacaatgcaaggtctaaaccatgtaaagacagtgctcgacaatggcggcctcgctctgggagtgtggcagctattgcccggcagcaacatgtcgcgcactctagcacgagctggatacgattgggttttggtggactgtgaacatggaaatatcgatggctagtgtttttgtcattattcgaaagctcatgctaacattcccacagacgccgcaatgcacgaagctgtccccgccatagtatcatatggagtgagcccgattgttcgcgttccggatttccaatcttggatgattaaacgtatgttaaacagagtatatcgctagcccacttgacaatctcttatcctttgtataggggctttggatgcaggcgcacacggagtcctcgctcctcttgtacgaacagtggaagacacaaaggccttcgtcgaggcctgccgattcccaccacaggggaaacgaggcttcgggtcgcctttcccgatggacaggtttggtaggaatgtatcagccacccagtacctgactgaggccaatgccaatcttctgctctcagtccagattgagacgagagaggcttttgacaatgtcgattccatcgccgccgttgaagggcttgatctattgtttgtcggaccttttgacctggcaaatggtatcggccaccccgtactaggtagtacatttgcgcctgagttggaacaagccattgagaaggttctgtcttcggcgcacaaggcaggcaagaaggctggaatctactgtggaaatggaaagcaggcaaagaaatatgccgacttggggtatgactttgtcaatgttgtaactgacgttggtgctctgactagctcgctcgcaagtgagatggagattgtcactcaaaaagcaggcaggactgcctctgggccttacggtagctagtgcatcctatatactattgaaacgaattttgttggtctcgctcttcttgatcgcgtaagtcatgaaggacatccatagatgcaccgtcgcgagaatacagtcattcataccagagcattccagaacgaattcgactctacatcaacctgaaagccttgggcaattgcctcaaggtccagatccgataattccaaactcatctgaaaagatccaaattcaagtggacgatctgcgacgccggattctctggcaacattaatagactcgggcatgaccatgtgctcgctgggaaagttgttccctgcgcttccagcgcgttgattgtcgtctgcaacattgattcctaagtgagaaatcaacttatccaaattctccctggccttttctgctgcagaatagaggcgtgtgtgttcaataagaatatttcggcaaaaaaccagtgattggaacatggttgagttactccctttctgggccacaattcgtgcgtggatcgttgcactgatatacgtagcatatgagagcatgtatggtgcactgctcaaagagaaatgctgcgagtagtcatggagaatctgaacaatttggttcgcagctgcggtacatgcattcaccgactcgtgggcagttgttgaattgatgaccccgtcgtggccggttattaaaggacgatggagcaaaataataagcacattgaatagagctcttggcaaaaattagtagctatcaattagtcctggttggtgaaaagaacatacaaaagacaggcagactgaggaaggagaaccgcctggtctgggaatgacagatagtcaagccgacgaggcaaattttcgcgccagtttctcagctgtgacttgatttcccttgagatatttgctcggtgaaccagatttgactctcgagattctgaataaatctctcggagaatacgttccacaatcgttgtcaactcgcataaattagtgagtaaagaaacattaagcgatggaaccactactcgaggctttgtggtcatgtatgtgataccctgaaagggttcaagctcgtcaaagtcatccagaaagtccagtgacgcgctcacattgacacggttgagaaggggaggtctcccttggaaaagacactggatcttatcaataactagttatcagaagttagagacgactcgtaagacaatacccagtgcagaaaagtgatagctcacagtatgctccccagagaactcgctttcgaatttcaagttcttcggcagggatactatccacagcaggaagcacatgcagaccaagatcaatgaacatattgaaggcatttccagcgtagagccatgacagactcctttcatcacatctggaaaaaagcgcattagacataatcaataatgcctgaagggtagtgatttcgcttttatcaaagcaatctcgcaaaagctgcgtgaagcgttgccggaacttccatcctgcagtcgtaatgtcatttggatcggaacgaagctctggtcggtcgcagtgcttcgacactacaaaaaatatcgcattcaacagcaatttagagaagtacggcccctcgcaggccatatctcgcatgaaagccggccggtaaattatctgtgctgtgtaaagctgacgactccaatatatggagagtagatgcatgccaatatcaggatcgataccatcaaaatcgagtcttccggcagcaagattgagtggctcaagctgtcctgttctttccaaattagtatcataaccatatctggtattgcagaaggtgcgacttgctctgcctcgctgtctgggaaaagagaaaatgccttgttccctcttcgttggatggacctagtctattctgctcattatagttcggactggtatcatcatacaccgtacttgttggcccatgatacaatgatgtgtttctgcggtcgttctccggtatttctgggtgtgatgcatctctagttggaacggagggagagtcattccgcgagagaccaatacctgttactctcgagaatggcaatggggtatgtggagtgctttccgatgtaacagaatgctccgggtccgatagaaccctttcggcagaagtgctagtttggaattgggcacatttctgtcgaaggatttcattctcctcctctaattccacaatgcgatggatggtcggcccaaaagcgaagtatcagcaacttgaaatttggtcgtaagagtctcatttgtacctcgggttattctgggccacgcatagccgacaatcgaggctcttggctagacagttcccacactggggccgctggccatcacacttcaactacttgtttgatccaataataagttcgaatcccatgtagaggccaagaatacgcacctttttatggcgacaacgcacacacgctacggctactctctttcgaatttgcattgtgcttcatgaggtcggaaaactatccgagatttgcttcacctgggcattccattggatgacgtcagccgtagcattacttacataaatagtagccttgtttatcaggcaccataaagcatatctctgcgttcttcttggcgggcggtattagctatagagtaaataatacaggtgagtaacgttttcaagcttaatgcttaaattattaaggatcaaaaagccgctataaaggctacacgcgctaaccggataaaaaaagctttgcaagcgccgcgctcaatgcaaaccataaaaaactccaatgaatgcaccagctccatgaacttcaaacaaacagctgaaggcaaggaccgaatatcaagaccggagtagacctcaggcaacagcgtcgaccccctgccaacaaaagggaactctaccaaccaggaataccagacttgcatctaatagcctcaccacaagagccttcaatttccactaccagacatagccgcatcctcagcgacacctccggatccatcaaccgctccacccgtcgcagcgaccacgcgatcaacctcgctgcggcattcgggcatagcgctgcgcatctcgcgggccagcacgtcacggaagctcgcaaaggcctcgcgcttcccgcgcaggtcctgattaccacgttgcacaagctcgacgaactctcgcgtgtagatatccggattgcgcgccgagtcgacgtagtcgattatctctggtgggagctggatgctggcgagggaggggttagaaggatcggtgttggtgtctggttgggtttcttgtgttggcgaaagttgtgtgtgtgttgacagggtcgaaagggcgagtgttagatttttgctggagtgtattagttttggttggttagggttggggtttagtgatgttgcttgtcgggaagtgtttcgttctgacggggcacatttataggcacaatgaatggagagtgcataggatgctattgcagttgacgtacatctttcgcacaagctcttgctgtgtctctgggcccagatagccgtggacggcggattgtatctcgaataagtgctggatcacatctttgaggtcgtctgtgtgaggagttagcatgtgcactctcagagctacctagtgctcgtaactcaccatcgaccgttttcaaagtcactggcgccataatataatagattgaaagaggtctcggttcacaaactcaagatgaggtttctcttgctattgcggggagaaacaaaggcggtgtgggggatacttgatcccatctacgattacagaaaacaaaggaaactactaactaactagtgttttcggagacaaatttttaaaaagaacttatgtagtttccaatatgtcactatctatatatgcatagctcgtgggaaccgatctcattccccgagttgcgtccgcacggcgaacacacgctgaaaccgcatcaagtgaaacaaacaagaattgtaacctatgctctacacttcccgtgtcctcaagctagaaagattcggaattttgatctctgtctccatttcaagcccggacaagcttgggaaccgttggctgaatttggcctcccagtcctctcctgtagggcttgccggagtctcttgggaggaactatggccagtacccggtcgcgaggtggctgcgccagcgcgcaaattcttgggtttaggtggtgcagctggtcgatttgcgggacgttgcgcggatgggtgactggtaggggtgacagattgcgggagacttgcggagatattaggtccatctcggcgatctgggagggccgtcgaactctcacgaggagtgtaggtcgaacttgatgtgtgagaagcgagcagctggctagaggtgacggatctggcctcactctgctttgccggcaaagaagaggaagtctccgtgaaccgtccatatccagtagcagtctttggaatggtcggtttttcagactctccgagcaacgactgtaccttgctctgaattgcgcgggagcgtgcaccatcgcctatcactctgccacccccgtcacccgtttcggcaacccgacgccggtactcagctgcggcattggcaacgcgtttctcctcttgagagagtcggcggcgttccagctcccggcgcatctctggtgatatgtcgtccctgtccgcgtcttccaaggcaaactcgtcattcggcgaaagaccatcgtcggctgaatcccaagtcccaatcagaccctgccgaggcgcatcctctggcgatgatgatgcggatttgtcttggttgcccgcttcgaatcggcggaatgcgtcgccgaatcgaccggcaaataggtttttccctccagaaagcgacaacgtagacagactagcgcgtttgttgtgtttgtggctattactagagcgtttctcacgcttccgattgctctcttcttcttccatcgcgcgtaggtaatcgatgtcagaggaaataatccgatcagactcacgatccacatccgtacgcactgaccgcagtggcgcgccaccatcgtattgtaggcgggaaatatccagcgaagcccgcgggctatcagagtcacgcggctggtcatacctggctcccggctggacggacattggccgagcctttccgatagccgatttagaacgtcccacaggatcatttacctctaatgctgaaggccgtctcaaggtttccatcgaggggcgggcggagttagactggctgggtatgcggtcagatggcagccgcgagcttccttccacattcaaactcggcatcgggggggacggcgctttgtgcgggcgtgtcactctttgttcctgctcggttgtaaatggctcgctggaagatcggggttcattatcagacgaagggaatcgataaattgggcgactcagcggatttggctccggcaaacgaggtgtttggatgggtgaggtcatggtacctgtcgacaccatcatgggccgctgaggggttggctggtacaagggaatagcctgcggcgcaggcatttcacgcaaatccggtgctctgacaggagatgtctgggatagtcgcttactgaccggcttcggagcacgttcgggcgagacacgtcgggcaaaagcatcatcggctagggcgttggtaagtcttcgagatagatcctcgtcctcgggtttggattctactgttggctcgaattcaaacttgtcccctttttcatgcaaaaggtcaaactggtccaaggaggggaatcgtttagacatttcctctgccgtcttctttcgggatgcgctcccatccagggctgcaaatggatcatttgatgaaccttcagcagcggctagatagggcgcaggactcggtctctcggagccgagttgagacgacggggatttgccaggtcggccacgccgcataggtgcaatttctgggattatctcggtctcctgcatcggaggcgaaaatactgcgccgaccgcgggtgtttccgtgggcgtgggcggtagctcttgatatttgcgtgcctccgaaacagagcgcttggaatagatcttcgtgacagtcagtatcaagttttcactaaaaaaagacatgggccgacatacgtctttgataggaacttccttcccttgcattttgcacacctcgcgcacgacctcgtatatgttgggacgattgcgaggatcttccttcaacatcgagcctgtgcgcagctgtcagccattgatgatcgattataaattaaatcaaagtcttaaacttaccaatgaacagctttagccgactcgaaaagggaggataggaagggtatttgaaggtcgcgttgagaatagccatctgaccgacctcttcgaagggggttgtgtagtagcataatttgtacaaaaacacaccaagtgcccatatatcactcttctcgtcaatcggttgctttcggtagacgtcaatcatttctgggcttcggtactgcagggttgtatgccgctgcacatcatcttcgatcaagcgaccctcagcggcggaagtagcagcaggacgagggggtgctgatgatccaaaatcacacagtttgtaagtgggggaactccccttgcccgagatcagaacgttctcaactttcagatcacgatggaggaggggcggtttgagataatgcatgcacgcaacaccttcagcaacatcggagaatatcttcacgatctccggctctgtcaaccggtgttggagccgggtgttcatgaagtcgataagaccaccgcccgcgcagtactccatgatcagaaacacctcatatccacctccgcgcagctgcgaggcatgcgaatcaatatacttcacaatgtgccggtggcccttgagcttcttcatggtttccacttcagtgcgcatgttggcaagggccgccttgtcaggcacggccactcgcttcagcactgcggtttcggacccattgactggctgaggcaatcgcaccacgtagacatgagcaaaaccaccctcagagagatacttctccactaccacgcgatggttgccaacttgaatcttagtgcccggaagcaaggtccccgcaggtgctgccgctacggcgacgggattgtagacggggaattgacgtgacgtcgcgggatgaccgtgggtaggttgtgaggacatggtgccggggtgcccttcaagggcaggtcgtaaagcggttctcggtggctagcgacgcggcatagagagtgagacggagattgagggggattcgaggttggcggagataggtgcctgcgagaggactaaaaggacaggttggcgaagaggcggagaggcggagaggcgcagacacggggtagtacctgactaccagactattacagggggatgacaagaatatttgaagctgagatgggataaaaagaaaacgatcaacactcagatggagagagaggaggtattggaatctcaagtggaaggccacccaatcaccggctgcggatcacgttatgccgagtcttgtccctcaccatcggggttgttttccaccttcacttctcctaaatgatgactttcaatgtgtcttcccactggcagactaatagttatccagtgtttagcatgaccgaagtgggccaggatgaatcttaattgcctctcataggaccctatgtcctcttctccctggtcatggtcctacacctcatgtcccggtcatgggacgtctactccgtatattgatacggcgctctcgcaaccgtggatggtgaccgtgagatccacgacatagctgctttcctccttttttttctttttttttttatgaatcaggagccccaacatgggagtcacattttaccgcactctccaccctactatcagctctaatccagtgaacaagcctcggtggctacatcctccaagtcgaataccttggacccactacgctcaaattatctcccccaaccgcttgaccgcaagattaacaagtgttttcagcgctccgccccaagcgctatatgctcggcgaagacacttgaaatacatacttggaccgaatattcttcgcgctggtccgcggctcgaggtacacaggcattaactgcaaccgctcgtgaaaacaacctacatgacgctcgcatgcttggacttttaacaaacaatgtcaacatccggagcaccccgggcttctaataacgtgccgggaagaggctcaagcggccaatacgaatacctcttgatcacagagaagggcgctaactgcgaaattgacgtaggatgtatgatatagcagcatgcgagatactatacatctttggacctgggttataagcctctaactggttttttttgcttctattccccacctaataataacccttcctccatatctcaacagtgcaagaaagcggagagcaaggcggtcggaatcatggaggaacgatattccgagcggtaaatttcccaaaatagtaagataaaaacaaaacagtcgtacttttgcgatgttgacaggactctgagcattgatgcctgtgcaggtcgaaaggctttttcaaaagccccttaattgagaacaagcactatgtagtcatagctttgaacaatttcattgctataactagtcaaaaagctcactgtaattgttcctgtaattccatcccttagctcggtatagccacgtagaatcgcgtggcctccggggaattctacataattcgggtaatagatgggagcagataagaattgaggtctttttctagtgcgtttgctcatttgtattgtcaaatttgtttttgatgtgatggccacgtcgagtgatctggaagcgttggcgccgatccttagctcccacacttgtcttccaaacaaaaacccccccgtgtcagacttaggtactcccgcgcttccaggtttttgctttgagatttggattttgtttggatttttgagcttagttgtgtgctttttcttggatttggcatctgagtaccctccacagcactgagcgcctggggcctcagtgcaacacttgtcagactaatatgacctggcagttgactctcgaccgcgagcacttgtccatctaggattgatccggtggatcaacccaggttatagctagtcgttcgatcgacgctgcacttcgctgcactgcggcgcatctatatatatatatatatacactgtcgtcgctccaggctgatccaacatggacggtccaccaccgccgccgccgcctcatggagaaaatccccatacgactgaaggagaatatcgcaaatcctcagacctgccagatggcaactacgacatttttatcatcccacctcactccgctggctcgggcttcctctaccttccttccctgcagtgcaaccgaaacagtttcctagctggcgtcgcaagcaccctcctcgcatgttttgtatggtcgtacctctccccgattgtgaaggcttggtatctagccacggtcactaacggcaatggtacgggtatggcggtacttgggatcggggtgggtgtcgctggatggctttttggctccactcagtccagtagctcgggagataaaggcaatggcggcgcacgtggtgggcggttcggatttggtggctttggtcgtggttctgggggctcgggtggctctaggaacgccggtccaaacaccaaccaacagtcgtcgggtgccaattacggcggcaacggggcgggtcagcaaagacaacagggaggaaactttggtggaggacaaacccacggcaaccaatattccggtaatcaatatggctctggttctcctccaaagtctgataataacaaacgtgaaaaggaggaggctgaaaagcgcgctaatgaggaacgtgctaaggaggagcgagctaaacaagagcgagccagagaggagcgtgctcgggaagaacatgctagagcagagcgcgttagagaagaacgagctaagcaagagcgagccaaagcggaacgtgctaaggaggagcgtgctaaagaagaacgcgtcaaggaagagcgtgctagagaggaacgggctagggaacgagccaaagaagaagccgaacgggagcgagcaaaagaagaaacgagacgcaaagaggagctacgccgaaagatggaggatttcaagcgcaagcgtgaggcagatgccaaagaaaaagagaaaaagcgcgagcgcgaagcaatggagaaagaattacaggaacggcgcgagcagctcgaaaaggagatggctgctgctagggccgctgtagagaaggaggcacgcgagcaactggagaaggaagccgcagagtcccgcgagagacaggcaaaggccgaagctgaggcgaaggctcaactcgaaaagttggaagcagaagctaaagaggcggccgctaaagaagctgctgagcaaaaggctgccgcaaaggccgccgctcagaaagaagctatagccaaatttgcggcgctcaaggaagcagcaagcaagaaatacgctgagaagaaggcgcaagacgcaaagaaagaggccgctgccaaactcaagtcagctagtactagcaatgtgcctcgcacactttctcccaagaaaccagcaccccacccaaccaccaaacctgccaacgatgacgatgcgtactcctttcgtccctacgaccgaccacggcggccatatgcggctggctcagtatactccgagtcttcttatacaccttctcactcgactgcgcgcacaacacctcccccctcacatcgcagtacatattccaccaaggatccagacaagattgtgatccaaggtgtatacgccttcaataatgcctttatgaagaccccagtggcgcaacttgtctcaggccaaggtatgatcaccgatgggctggtgctgcgcatcacaaccgaaggtctcttcatcgacgatgacctacgcggcatcggccagcgtgagtgggacgtcaaagcatggaccatcaagctggcggaggtgtggtgtccacagttaaactctgctccatccgccaaaaacgcgtccggcaaccctttctctttccgtcgtgggaacaacgttcccaccagcgaagaatcagaggccttcctcggccacttgcttaaagtatgcaaaaatacttgccgcctagcttcgcgcagtgctactgccagccatgatggtggccctgtccacccgccccaggggtctcgttgtctgcacattctccgcgccagtgttcgtgaccaagaaggcaagaagtatgtctttgtgctgcaggatactgaggcctggaaggtcgctatcggtctccagcggctccgggctggagctctggtccgctcgctgggtgtgtgctctctgccggtccctgattgcaaaactatgctcggtgctctcggttatgtttgattgaaaccttgttatgccagcgttcttgttacctttcttgcattttatttatatcccaccatttatctctatatgcccttcttgtgttcgattcgacttgaacgtcatcactcattagcggcggagtttgcttgatgctcttctgtccagtatatccattcgttactcttgtcttcttcaacccattatcttttgagattcccctggtttatctgttttatgtttattattacggtttttcaacatgagggaaagtatatatcacaaacgttacgacagcttacatatattgtttattatgcatagttacatggcatgcccaacccttattctgtatgatggttcctcaaacttgatgtcatcgaccatgtatggtgatcaatgtagcattgtcataataggtaaagagaacctcacgagccctagagggctgcatgtaactagaaagtagaagagaatgaatcatatctgagaaatctttgttttatgagtgtcatgcaggtatatacgccgcatattcttctacttgactatgtaaagagtgacaacctcaccaagtgtatcgagagccgaaagatgcgaagcaaatctttatgtcaaagtccacattggagtaaaccccagagcaataaaaaaaatagacgaacgccgaaaatggttgatcggatgtagagcttgtagatattccgtacacattgatttcacgtccatagatgtactgctctcgtagatccattccagattgcagcactcatatacaaattatccgaagggggccacaatggggaaagaaaacattagaccgaagggaaaaaaaaaaacaatatcaaatctatcagatcgggaatcatatggcgtctccgcggaaacaaaaaaatcgtgatatggcgggcagtgggcaaaaaagtgaaaccccagtatccaacagagcaatgtgtgagatatcgaggtgcaactccaactccggtcgaagacatgcaattcctgttttgagtttggtcatcttgagacaaaagatgaaagaatcggtcgtggtatcgggtgaataggatgagttcgatggcatcatctagaatgaaaagccgccgtggccaccaaaggagccgccgccgttcatcatgtttcgaagaacatcgggatcgatgtggtgaacgccgccaccgaagccgccgaaacctccaccaccggggaaaccaccgccgccatacatgtcagctgggtccctcagatcgtctccgttatcgaaagcagcacgtttcctaatgaggttagcattgtgtcgaatggggttgaaagttgtggcggacttactgaggatcaatcaaattctcataggcttcaccaatttccttgaacttctcatcgccggctgcaccgtcacggttcttatctgggtggtatagaatagccaacttgcggtaggccttcttgatttcctgttcgctggcatcactctcgactcccaaaatcttatagtagtctttgcgttgagacttcttcagctcgaattcagcttcgcggatctcctccgcaatgccgctctcgccggggttgttctcagcaacgctcttatagtcacgaatagcctcctcccagttaccggccttgccctgggccttggcacggtacttcatagccttcgtatacccggggtcgagacggagcgcttcggtacagtcctgaatggcagaatcatactccttcaagttgatataagcctgggcacggttacccagaatcttggcattcatatccttgttggaggggtcaacctcgagagcctgtgcccaaagatcgatagcacggcgatagtccctggccttgtaagcggtgtttccttcctcttttgtgcgagacaacttctgcacaatgcgcagtagcttgatggcctgcttcatgtccgggtccagcccgaggcacatcttcagaaccttctgtgcctgctcggtttcaccgagggcatagaaggcgcgggcacggatcatcatcgcatccgggtcctggctgttctcgcgcagcaagttgattgcaatgtcctgtgctctgcctagcgagttgatgttgttcagcctcagatgggcctcggcggccataagcgtccacttgcggggctcccggacaccttgtccgagcccttggcgtgcctggtctagacagtagatcaccatcgacacaccgcggtcttccgctattgtccgctcggcttgcgtgacgaagcgtaacatcttctctgcggctgcccggtcggtggcagtggctggtggctggatacgtgacagcacctctagggcctctgcaggacgacccaaattcgtcagaatcttagcccatcggtgcatgatcttcgggttgccatgatcgagctcgctggcacgttgaacatcctgcaacgcattcgggaattgtttagcggacatgtaggccgccgctcggttagagagatagactggtgagttgggattgatctcgatggctgcagtacaagaaaatcatcagcgaccccgctcattcaaggctaagtcatgagacacggtgtccctgtgggatagagaaaatgcatacccttgttgtattcatcgatagctcgtcgataattgccatccttgaagaacttgtttccggccaacttgaaggagtcggcctcgtcggcagaagatatattcgactggtgcggtggcggagtcggactccgctcctcagtttccttcacggcatctttcttcacagcatcggtcttcgccgtctcagtcttcaccgcatcagtcttcaccgcatcaatcttcgcagcatcagtcttcagggcatcattcttgacatcatccttcacagcatcaatctggggttccttgggatcaatatccatgaaattctgctgctcttcgttggatgctgccatggcggacaatcgacgacgtagctcgtcaggtgggagattgagtggatgtatgtcctggtcacgcgaagaccgggcaaacttgaaattggcggtcggtccggaattggaggatgaccgactgagagaaaagtatgattgtttggcaggtttgggagatttggtgggggacgatgatttggagggagatttggtaggtggcttggttggggatttggagggcgacttcggagatggagatgtgcgcgaagcggagaaggaagatcgagacggacgtagatcaggtttgttcttctcggtcttatccttatccttgtcctttttgaagatgtgggcgagttggaccattgggggtggggagggagtttttttttttttctatcgaaggcggtagaatcggggagattcccacggtgtgaaccacggatggggggaagaggaatatcaacttgggacttttttgcaactttgcaacttcaatttgcactcgggaatcttttgattcaagtctgagccatgccttgtctctcactctctgattcctgtcatgttaatctcagaaaataataagaaggttggtggttggactgggtttggtaacctggatgcttgatgccggggtgaaaaccagaccgagaaatcagttgggcctgtcctcttataatatatatattttttttttcttattctatcatatgttccatctttgctactggctggcaaataatccagaggctggagagctcctggtctgtgttagcgcgcaaaagaactggagcaatggagtcactcatttctggccgggattgatgcccagccgcgagggggaagggaaaaaaacagctcgaagagattcgagaatcttccgtcttcttattatcgtcttaagtctatcaccccctcaacggaacctgcaggggtggttggcgaggctgtcaatgactcgcggtggagcggtggatccaatgtgcaggttgctagtttctacgctgacgggtgacaggtatacagcagtaccgttactggcgtttcagagagtgggacccctgtgtcgggctctttgctgcgagattattcgcactaataatcttgtcggaaccggctctccatgccgggatacacttaacgtatcgagtgtaagtcttggctccattaggactcgtctgatatacatatgatatacatatgatatacatggtactaatgtctcttaggggcgaaaccaaggtgaaacaccggtcttacagcgtcataataagtctgatttacaaaaagaagccaaaaaaataggagcaaagcgaagcaagttgaagagtgagtattataatgctagtctgctcaatggatttagaatagctgtaaatagcgtcaagggaatatgtacagagagaaatataagagagagtatagcagggagtatagcagcagaatgataagttcctttgctgactttagggctatttcaccgaggtatctagctaccacgctgttgttcttatgtacccagttcctcgcggggctcccgcagcaatcatttcgttttttatacggcaaaccttgcaaaagatcgtttacgttacgtatgagcggaccaatattgagggtagtctctcctagatcaaaatgagtttgatattgcttagtttgatagtggagatggcacattgaccccctgttccgttcccggtagcgcatttccgccagcgttgaactcaaagccaatattaagaggaaccaataacaggcgagcttgttaagggctgacggggtacccctcttcggggatataacagtgagcaaaaagacaaccccaataaatgctcgatcaatcttttttcaagcggccttttatactcttagaacaggcgagaggaaacaatactacagctatataatttgaaatcaccataaccactgagccactgaaagaaagcagccaaccaagagtcagacctgagatgaaaccagaggtgttaccgcccctttcctttgtctattagcggtactcgggttcttatacagagaactgtttcaagggaagtctaaatgtatcgctcaatacctatctatttggcattattgtcgtcgttcacagatgagcgagtgagcttccggaatcaatatcaaagacgtcataacgctaagcggtaatcacgctgctcatgcccaattccgcctctcctcatgcattctttgggcaattcggacccagctggaaacccgatcatctcctagagctgcgtcgtatgtttgaataaatccgtgttcgtcatatggcggaggctggaccagcagatcctcccgacgaaggcgattattgtaatcgatgtgctcatcaaaacgttgaaacacgtcgcgccatggtctaaccggcgaaattggtgagactggcgaagacgctgtatcatcttgaggctgagcatcatatgcaccatgcacatatatctctccaacaatccatttcttctcatgttcgagccaagtgatcgggacacagctccgtgatcgtgggggagaatgtggaatgtgctgtatacgtgggcgcacctcgtattcgtggttgaggaacagttcgtccggcggaccaattggacgtccacgggcttcggcccatcttagattcgcatcgattggggagcggttcggtgaccggttctgtcgtgtgttacgatgctgtgttggcgaggtagcgcccgttgaagaaggtctcggtggcagaggttttgagaacaaatattgaatagaagcacttgaatttgcttgaacacgaggggtcgttgtatctggctgaacaatgaattttggattaaccattgccgcaccccccagggatgagagatccatgataggacagtcgagatcggagcctttgagaggctcggaagctcgtcgcttaggtagacagaaaagcgcgattaaatagggggcgcgatgagtagatcatatatcatatggcttgatatactactatctttagatagtaatatatgtacgctttgggggcgttcaagagtggaccatcacggagggctcgtatctagataatacaagggaagttgggctaaaaggctccttcttagggttgatgcatttactattctctggagaagggaatataacacatactacggagtatgcagggtatacacggaagatagatccttaggcagtgcagtggcaagaatgctcttagggccaacaaaacaccgacgatcgttcatttctctgtacattgcgtatcctaaagtcatagccgaaaatcaattgcccgaatacgaaattgtgccgttccttttcaggataatgatccttacaatttggggtccaaattcacccagggggctgtgcattgttttctcatcctcactgcaatggcgttaactcaccagatatattcgggcttcagtgcgccttgtggaaagtaacgggaatggagtgccgaggtatgtccaagggttgtcggagtaagatatattgcaatgagaaggagccggactcagggctcagatacgatatgtatttaggcttgagaatgattacgtatcacacactgctttcgtcattttcttctgttcctttgcttgacgggaattgtccgagtggaactaaaagacactcgattcgagagtgtgaagccgctgattgtcggtgaacaagccgatttcccactcactgaactgtggggctctatttttggctgctaatcgtttactaggtgtgtacatactacatacggagtacagatcttatactcatgtgaacctatgttgtacatagtacaagaatagtcgaccgcttatacagccttctcatatcccgcagtttgtctggcaatactagtaacatagactctactgagagctttcaaaatggactggtcgatattgaaaggcctagaagaaatgatagatttatgaatgtgcaaaaatgatacattccaaataggctacaggcgctggagagatggagaatgtgaaaagctgtcatggtttacattaaggtcgtgctcaagccaccaagcgagcttcgcacaactccgaagctatccaggagagcccgagaagaaataaaaaggagtatgtatatcaaaaaagcaaaaaagggatagacatatccagtcagaaagcgaccattgttaatggtaaatcaccagaaaccctaaataacaaaatcctcttcttgcatcacctctaaacaaccactccagttcggcacagtgacaactccagagtgagacccaagggaccccactaggtctactagtgcatcggaaacccaaaagatgtcatttacaggaagaaggcagcaacggcggcggcaccggcgaagccgagggagccgctgagggtagcaccagcgttgaaagcaggggaggaggtggcgggagaaacagggacggtgccagtggcgacacccttgctgctggagggaacgtggggaacaccaccggtggggccgtgggggatgacgctagcagcgggggtagtggcagcagcggacacgggcacggtcgagtagataacggtgggcacgcaggtggtgatagcaatcacggtggaggagaccggggcggtgccagcaggagcgctggggacgctggcgggaacgctgggaacgctagcaggaacgctgggggcgctggagggagcccaggtggggacggaggaccaggcgggggtctcggaggaccagacaggggtctcagaagacgaggggggnnnnnnnnnnnnnnnnnnnnnnnnnnnnnnnnnnnnnnnnnnnnnnnnnnnnnnnnnnnnnnnnnnnnnnnnnnnnnnnnnnnnnnnnnnnnnnnnnnnnnnnnnnnnnnnnnnnnnnnnnnnnnnnnnnnnnnnnnnnnnnnnnnnnnnnnnnnnnnnnnnnnnnnnnnnnnnnnnnnnnnnnnnnnnnnnnnnnnnnnnnnnnnnnnnnnnnnnnnnnnnnnnnnnnnnnnnnnnnnnnnnnnnnnnnnnnnnnnnnnnnnnnnnnnnnnnnnnnnnnnnnnnnnnnnnnnnnnnnnnnnnnntggggggggtggtgctgccggtaggctcaacaccggcaccgctgttgccggggcagttggtgacagtgggagcgcaagaggtgatggtcacctcatcggtctcatagacggtcttgtcggcaccgggggcggcaatggccaagctggcgaagagggcgatagtggcagtagtgaaacgcattttgaatgttatgtacgaaaaccgtaaaaagtgatgttcaaaaaaggtatatataaaaagcgtagcttcttgtttgaaagagagtgagttggtgtttaaagagtgtaagaccgaagtcgagagagagtgaatgctttggaagaatgtacttggagagaagaaagaaacaaaaactacacgggggaggcagggggcctttgtatgaacggggagattagtgtcagatcagcagccactcgctttctctcttttgggacgagtttggccctaaaaaaaggggaaaataagaacgacggtgtactggatacttcatccactactaacccacaccgcaacctgacatgtacctgtaacctggctctcgcacttcaatttaggccattctatgattggatcgatggcgttgtttcgaattaccaggtaattttgacccgccggtgtttcttttacttgtgacgatcgcttcaacattagggacgacgacatatcaaatggttatatcctccgtcctaagatgcatatactccgtacgctctcccctcaagtaagaattcaactgcaataatactcctctgcaacacccacttcctctcagatgtgttctttttctctttctattgatgtttcagaccgcatcgccgatccactacccgtccctggcgtcccagttgttggcatttccccgtgggtctcttctcatctccacttacccctgaacagcccgccatttatttcgccaagagaacgtattgtgtaagggcgaatgatgatgtgcactttacttgcaaaatgggattggtttctactattcatattactttggaacatggaaccctcttcctttgtcggagcgaagcgccgagacatcctttgtattattacttactatatacgggtgctccgtactccgtactgcttgtatattagtagtaatttttgtattactgcactgtttcctccggtgcactgggtatatcgtcgtccgagacttgttacgttgaccatatatagcatagatgaacttaatatattgtactcatcgtgtaaccaatgaaatactatgaagaccaattttcgtaaaactaaataaacccaaagagcaatgccaatagtacaagtcactcaagagtcaagactgccaattgcccccgcaacgggaaggtcttgcttcacgccataacggctagaccgcattgttttacttccgggacagtgcttgatgttgcttgcatctcgtgcccctgttctaggcaatgtgggcgtcaatgcccaagtccgagcgcagtttgaggaaataatatcagggtctgaccgtttgattggtggcgtgcatgcagtaatttggagttacaccggtcactcgagctgtatgttgtagtctgtagactctagagtcgatttcctgtgcgaaatatgtaccctaaaatagctactcgtgtagatcaaagcgtgttgatcttcatcctgttcctgggtcgaaagttcggttcagactttcgaagtggttcgaccgtgcaagtcagggcaggatagcgatgtatgttgattagccaatgatcgctgagtcctggtctatgtccttgactttgactttggacccgactccatgataggggtttgttcacaccaagcggtttccgtaggccgcccccagactccacctacctgcgcttcgtggcccctttttcaatagatcgggcctctattctattccaacgtgctttgtatggcatggtcgtattcttatcaaccccatactcatctctggtactatctttagcttcatttagctttgtgggatatgattattggtggagtgtgtttgatatataaagtacggagtatctggcacaacgttcagccgtaccgttaatgatagggacgtgatttgagtggatctaggctttttccgaagttcatcctcgcctatcgcgtgagaggtccttgaccttcctcatttgctcctcatttgtctaagtctctgatatttagtaaggggctttcgcttcaacactcaccgctcatattgcagtctcggggttcttagaatcctgtaaatatcctactctccttcctcacatcttgcaatattcttgagcattgccctgcgccacgagcaagagacggatatcatatcggccaggtcaagggatttgtgattgacaattaagtcgacttgactgcacaatgacttgaatcttgaaatgacaaattcaatagcactttttcttcgttgtataacatagaatgatgtccttagcgcccactcaaaagcacttccgtgttgatgcgagactgttatcggctactctatcacatcgcctagtcaactctgtaggatctgattgcgtgtgatcgccatcgacaatcacagatcggacatcaaacccgaccgatcagcatcgacgcgtcatttttagcgctgatgacacaagctggcggtaccgagaagtgtggtttttgtctcttgaataataatactccgcatatattccagatacacgacatactgtacaccacaatgggctatgcttgaagcgccagtgagatcgagatctcttgtttcccaaacagcgactttccgtataaacaagcttttcgaagacaagcagacaatctcgtcagatattcatgatattacttttatggctaggtcgaacgtcattcaagatcaactattacgacagggtctacgtacaacatagtaaattatatacagcatacggattatgcattctccagcttcctagatcgagattcacctggcgcttgtctcatattgtaatatccacaatggggcttattgtactattttgcaatacgcttgacctcatgttaggacttggcaccggctttcccggcaagaatgtctaattaaatcacagccttagaattgaacgcttccacagtaactgatctttttttaacgcccaaatttcgggaaaagacagtgacactgaaatgctactggtgcggatcgactagggcccgcccatgtcatcatcgggtctcattgcgtggccacagatttgggctaagccacacctttccaagggatagaatcgtagttataattatcttggaattagactagaattggttttggacgagcccctcgatgacatattgcatgtataggtctcgcggtagaactggatatcgcatcgtatacggagtactctgtacataatacgttaatacgttggatgcatagtgaaaagtcggtacttctgtaaggctggcagggtaagacccctacggcctgtgataggtcatattcaggtgggggacagccctgaatgtgttggcaatgatgtcgacgccacagttttgggaaaagtattcagtaattgcggctccaaggaaacaacgtaagtttaatgattgacagtcgagatctagtcttttgggttggttttagtttgacacctccgtggctacatatgtgctatgtacctatatacatgtagatacatatacggagtatacctgcatcgatataaaaaaggggagagaaacatgaaccatggtactcaggagaattctatgttgctttggaagaattggaatagacatcaacttccacggttcacacaagaatctagacatcctcattgtacaattctacatcgtagacgtaagttgtagatgtttcagctcaggcgctttctgaaacatagaggccccaccacagcccgacctctggtgtcggctgtgtcgctctattaatattctctagagaagatagttacaaagatttgaactagaccctgacttgacatatatactctgtagcgaagtacgaaggactctatttcttatatggtggagtaacaggtcacctgccgcatctctcggtaacttcttactccactcgtttgttctctaccttatctctgttgcttctgcttctgcttctgcctctgcctcttctttggtctttgctgtgcctttgcatttgcttcttcttttacttctgctctgcttttcatagtatcatctgtttgcttcaatccgcctttttccccctcctcccaggactccccaaggcggactggtccaaggccgacactgtggctactctcgcagatccaaacgagttgttcttgcctggcgaaaggcaaaacaatctcgccatgtcgtctcctgttcctctccttcgtccgcccgttcctggcgctcgcaacaataccggcagcccgcgagccccgaagctcacgttaggcattcccccctcacctagcgccaaacccgtcaatggcaatcccgcccccgcccaagtacctcaaatccaaacccaaccccaacctcagcctcgcccgtcgggtcgaccagcacccccacgactgcatctcgcaacccctatgggtagccagcagaatgtatctccgccaacccttatgccgaacggtcgaccagccccgcccccactgagtacaaatggcctaggaggtggaagtggaggtgcgcccattctacaaattcagaccaatggaccagcctcttcaaacccttcatattcgacgattaatttcgccatgggacttcgacagccggatggctcgtcagatccgtcctcggctattagctcagtgtactcagatcgcgagaacggagaccgtgaacacagtgtgaacggccttctccccgatctggacaaattgagtctggagaagggccggccccttgatgtggatgatctcgatgatgaaggctggcacgcggccagtgaacagaatatgattgttgaactgggaagtctgggagagggtgctggcggagccgtcacccgatgccgactcaaggagggaaagaccgtattcgcgttgaaggtgcgttgcttcagctagtcaacttttgtatacctgcgctcggcgatagaggctaacatcccatcctagatcattactacggaccccaaccctgatgtcaagaaacaaatcgttcgtgagctcaacttcaacaaagactgcgcttcgcaccacatctgccgttactatggtgctttcatggacaaatccactggcaccatctctatcgctatggagttctgtgaaggtggaagtctggacagcatctacaaagaggtcaaaaagcttggaggtcgcactggagagaaggtccttggcaaggtcgcagaaggtgtcttgaatgggttgacctatctccacagccgaaagatcattcatcgaggtacgaaccattatccccgatatacattgaccatcagcggctaatgttttctagacatcaaaccatcgaacattctcttgtgccgcgatggcaaggtcaaactctgcgactttggcgtcagcggtgaattcggtaccaagggcgacgccaacacttttattggcacttcctactatatggccccagagcgcattactggtcaatcatatactattacatccgacgtttggtctctcggtgtgactttgctggaagtcgcgcagcaccgattccccttccctgctgacgggactgagatgcaaccccgtgcagggctaatagatctcctaacttatatcgttcgccagccaattcccacgttgaaggatgagccacaaaatggcattcgctggtcggacaacttcaaatacttcatcgaatgctggtatgtactctgtctgtgtaactctaattcttatatactaacgcgatcaccagcttggaaaaagaaccccctcgacgtgcgacgccctggcggatgctggaacatccatgggtgcaggatatgaaaaacaagaaggtcaacatgacgaactttataaggcaggtgtgggattggaaagagtaaacacgtccccaaggacccttttgagggtgccttactgctttgctgcatttcttttgagtatgagtggctggaccccaaggattgacctggctgtcaacaactcaaccccgtttctcacgactctacttcgtatctatctgcgttttgtgctttccgctggctccccccgggccggaactggcggggctcgacattactctcataccccgttaccatcagcaaatgctttttcctttttttcttcgacacgaatctcatcggctacgcttcaccttctacgatccttaatggcctgacattctccatgcattgcatacccttcaatccttttcgccctctccttcccttctcgctgtttccgtcgtctccttgcgatggactggtctctgcttttgcttcgtcttttcccgtcacatcgagcctggacatatcctccatcttcgtatatcgtgttttcgtttttagtgtacagcccgctttcttagtctgctccaggattatatttagggtctactttgctttgcactggatgcgggagtgttgcaatgcttggagacttcctttgggacatacttaggcacttaataccattgcatcttgtcttcaacttggatgattatgtatacggggacaataatatacgtcagctagtccttctgcttctaagaaaaaatatgtctcattgttatcataaaagctacatacagcacaggtctcgatatgcatcctcgtcaaccacaaaagcaactgtaagggatcccaaccttcagttactcacaaccctatattgttcgcgcctcccctacttcttgctcaccggatcagcgccaagaacccaaccaatcccactaaccaagcccccggtcatcatattgctaaccatatccctcttcctaacacgaccctcactatccggagatagcggccgagcatcatcccgaggagggagcgacgccgaactatcagctgcgctcctcagcgggaaagcattcttatgtagcgccaaagccgctccacgagcaacctcaaacagacccatcggcgcctcgtggcgacgagagttcggcactgcagcgcgcgcacggcgcgccgcgcgctgctgttccgtgtcgaaggcgtcgcgctctgagtctgacggcccgaatccgcccgggacggatgtcagtgtgtcgccctttctgtcccagagatcttcttcttgctgctcgcgcgcgcgcagcgaggtgagttcttcatcgcagcgacgccaggcgccaaggatttccgggagtgggtctggggatgggactaggacgagagcgagggagaggagttccattcgctgggagaggtgcgagatttgggattggagggttggtggcggttgggttggtgttgtggcgcggtagcgacctgcgttgtagacggcgcgccaggtgatgtcgtcagggacggaagtggtgtttaggagcggggaggaggtcgagaggagtgacgggggtgtgagtcgcgttagaatgtaggagtaggctgtgccgaagtcgttggaggatagagcagacgcaattgctagggaggttatgcggcgctctgcggcgagtaggacgtgctcctttggaggattatagtgggttggctcgtcttcggctttgtgtgatgccgcttgcgtgggaacgtctgctgccactaggtttcgtccgatggagagaagatcgtctagtttggtgtagctctttgggttttgctccagtactttctcaatcaagaggattggatcgtgatggacacgaatgctaacaggctggaatggaacaccgtgttgcagggtcagcgaatagtatgacagcgagtgggttgcggcgatgagggcgtggatctttttgaatgcaacagattctgggaagtgtgatgtgaatgattgtaagctaatttactgtcagtgctgagtccatacatcttcttttagtagcaccacatacatatcataagctctcttcattccgccccgtgttcgatttccgttgcttgcattatcataggctgtaaatatagcctcttgaaccgcagcttccacttggacaggattcagtggcgctggtttagactcggtgtatatatcgagcgccaattgatactctagaaatgccatcagtattgacaatgaatagtgaatttggatcgcattacctttagctgccagcagcgccttcaagatctccgtttcaaccgtgtcgcggggaatccgccagaaaattccatggtacggtgaaggttcatcccaggcgttgtcggactgttccacctgccaatctcggagccaaagcaatcgttgtcgaaccatagaccagtcttggtttaaacccggttgctgcaaagtagaattcaccacgcttttgagttcggccaattgcatttcctcggtgctgtgaaggcacatatttgccgcaacccggcagggaaccagatgaccaagttcggtcagtatacgaagggagagaagtaaagcgctaagaaacgatatcgctgggggcgatggcttggtaagaggattcgtccgtctcaaaagagagttctgcaatagagatgcgcgggatgtcgaggagattgactcggtatcatagtgcacagatggcagttctgaatcaggggtgaggtatgagctgtcttcgagaccgaggagcttcgcaaccctcgtcaagacctggaacgagccatccagcacagccgtcgatgagtttgcatgggcatacaccacagcaagacccgactggccgtatcgaacctgtaaatctctcgcctgctcttcggaatattgcgctccagcattgtcatatccccccaagtccacatctgatggtccatcccagtggttgaaggcgctcacaacgctgtcgcggtcgacaagactccgcgatagtagccattcattcacatgttcccatccagccaattcagttgcttgaggtctctcggagccttcaatgaaagataccgaactctgctgagcttcttcgttaagccttcgccgttttgaccgattaccaccatagagccaaggtccaatcagacccttcaagttgttgaccaaatccatattgttctcttcggagctcatcagagacaggagaatgttgactgcggtttgatcgtccatagactccaagatctcaagagatatagtttcgtcccgataggcgtagaattcgtagttcagtcgaagtaatggtaataggctcgatatcagccatgttcgaatgattggcgagtgctcgtagaaggggacgataagatcgagaatgagaggctgtagcgctgtttccgagtcgatcagatgtgcccggtggataaggaatttggtcaaaggatctgctgaagctatctcggcttcctcatcagggcgttgtagtggccgtaaatgaagcttccgcacgcgctttctggcgagcgattcggacaaatcctggacagcagatgtattaattggtcggtcggattgaaaattagagctatttgctagctcttgtagcactgaggtgtactgagagggctctgtgctctctgggagaaaggtcaagatgatgcgcaggaggcgttccaacggaaaacaatggggaaaccgggcctgtagaataggcaagtccgccacattaccacctgcgcagagttctgtagctagtagaatagcatgtacatcggacagctcttcgagagccatggtcaagctaaagagacgaggcagtcgagtgaggtggcctcatagttggcgatgaccatgttgcatacggcggggcgcacagaccaagtcggaaatgaaagggaagaggtcgcatccgccggcacttcatcactacctttttcgcggtctctgtgcctacaacttactcaattctcttcttatacgtatcacaatggcttccggttacggtaacagcggtggtatgtgctcatttcccccatccccggggaacctggtcgggtccgcgccaatatgccctcggatcacaacttgcgcacgcagttccctcccccgcgaataaaactggctaacacatgatggtttctcctaggtcccggacgctgctatcccttctggcaagaggttcttggttgctacgttgtgaactcggacgatggtgccaccggcaagaagaagtgtatgcccgccctggaggactactatgagtgccttcaccaccggaaagaggtaagggcaatccccattcgatcacgatacctgcacacttgaatcatggacctagctctaataatggggaaattggaacaacaggctctccgcactatgaagatgcaagctgcctatcgcaaggccgaggccgcacacccgcgagagaacgcccctaaggctgagcaaatccggagcttgggtctacttggaaaggaagaagaggcagccaatgtgttgagttaacggtgaatgggaaggatgtgcttgttctttttcgatgcgtgtgtttccgtgtttccgccccgggacttttgcccggggcctgtgactgtatagaaccgctcaactggttgattatcacgtctgtcagtgcgaaatgatactccaattcaacgacaaacggtgctttatcctaaattttgatgcgctcgatctttggatttcggtaatgcgagatgctgccatgtaggacgagatatgcctgatctcggaagtttaattaacgagataagcatgtattttgattgggcgcaggaaattaactcgaattaccagctccagccgtctagccgcttatcccggggttctttgtgtcgctagctttctctctgtatcaaggaattatactttgattatatgatacgataagcccatgaccgtctttataagaaggatgtaagctcataggtatgttctgtatgcttggcttaggggaaagtaagagaataacagaagtggacgagaatctacggagtatatagcggatatatagttcggcaggacgatcgatatatctgcatagcagcaaaattcgattgacatcttatcctttatatataggtacagaaaagcatcacttcttataccatgatctgatcacttatttttcagctatcataaaactatcacatacatcagtgtatgtacacgcactgctacattcgtaatcttggacattgaagaggccatctggcatgtcttggcgttgctccttccttcaaagcatagacgaaatctcaaataaaccttgacttgaattatccaccgaagttcgctccatcacaacagcccccagacattgaaataggtatttctgaccaatctaaatgctctatgtcatccaacgcgttttatggactcacgtgaccctttcagcagcagaaaaaaaaatcggcgcgctgtgagtggaagcccaccgcccgcgctaaaccacaaacagcctaggcggagtgacccaaacatggaccagcgcgccgggcagaagcacccgcaatgatataaacccggctgcgtgacctcgaccctcgctcttgtgtactaaatctaaatccccccgctgactcatcatcgcggcttgaggtgttaggcgttcggtctttctttttccatatcgaggtccttccaccttaatttcgcgccccgctccgcgnnnnnnnnnnnnnnnnnnnnnnnnnnnnnnnnnnnnnnnnnnnnnnnnnnnnnnnnnnnnnnnnnnnnnnnnnnnnnnnnnnnnnnnnnnnnnnnnnnnnnnnnnnnnnnnnnnnnnnnnnnnnaccttatttgcgcgcttcgtcgcgcgcaattgttcttttcctcgtgttgttctcttttttttctcttattcaaattgtcccgcatagtcggaagaaaagcgaagacccacgatggcttcccggtaagccccttcagccagttaccacgcgcctgtcacgtgaagctaacctaattcagactcgaccgtctcgtcacgtgagtataatggcccccaatatgtgagatcacgtgaagcaactgaccactgaccaatggcaatacaggctactcgagacgggcagtactcagttgattcgtaatactgctgctcagcagcttgcagatgtgcagaaacagcatccagatgaactgttcaatctactcgggcgcatcctgccttacctcagatccaagtcctgggacacaaggactgcttctgctaaagctattggattgattgtctccaacgcagatatttatgatccaaacgaggacgatggactccagatcaagtctgcagcagacgaagatgatgtggagatcaagtccgaggtcaaatccgaagagctagtcctggccgatgatttcctcaaactcgacaccttggacatcccttccgtattgaaatatggtaagcggctgctcggaagtgcgggcaaggagtatgagtactccctcgcgtccatggaaccagcttcacgtctacagcaccaaaagaagactttgactgcgcgcctaggactcgaaggcgaatacctagaagaagaccttatcgaggatatcgatctgcctcctaaagttgtaacccctgccctaaagaatgagccgactattccgtcgatctctcatcacaacagtcggcatgaagctcgctcccgcatgccttcctcgcctagtgaaagtgcgacaaaggaggacggggggctgagcaagcggcagctcaatcagcttaaacggaaaaacaagcagaatgccaagatgggggccaataaagtccgtgtcgtggatctgtcttctcgtcgacaatccgatattgccacgacccctatggccacaactccccaccctgtcaaagcagagaacggagataatcaagacggcgaccccaaacctgattacttttccttcgaacgcaccgaagaagatgacgactccaagcttgtttctgagttcaaaggagctgtcatcccagagcgacctcttatccaaccagagattgtggagcagggtgcaggatggcctctggaacacatgtgtgaattcctgactatggacatctttgactccaactgggaagttcgacatggcgccgcaatggccctgcgtgaagtcatcagggtccagggtgtggcagctggccgcctggatggaaaaagtcgcccagaaaacgatgcactcaatcgccggtggctggatgacctctcatgtcgactactctgcgtcctgatgctggaccgatttggtgattacatttcagataatgtggttgccccaattcgtgaaaccgtgggtcagactctcggtgctcttctttcacacctacatccgaactcagtccgcgcagtctaccgatgcctataccggatcataatgcagaccgacctgggactgaaccgccctgtctgggaggtctgccatggtggtatgatcgggatgcggtaccttgtcgcagttcgaaaggacttgcttgtcaaggactccaacatgatggatggcgttttggaagctgtcatgaaaggcctcgctgattatgatgacgatgtccgggctgttagcgccgccacactcgttcccattgcagaggagtttgtgtcctcccggactggcactcttggccctctgatgaacatcgtttgggactgtctttccaatctgcaggacgatctaagtgctagtacaggctctgtaatggaccttttggcaaaactttgcacattccctcaagttctggatgctatgaaggctaacgctgcagacgatccggaagcgtcatttggaaaacttgtcccccgcctctacccattcctccgccataccatcacgagtgttcgctcggctgtccttcgggctctcatgacattcttgaagctagagggtgagggcactacagactgggtcgatggcaaggcattgcgcttaatcttccaaaatcttcttgtggagcgaaacgagggtgttttgaaactgtctggtcaagtgtggtccgaactcctcaacgttgttgagctgcgcggttcgttcaaatctgaagaggagttatcggactccatccagcctcttgtcactctgactctgggcgcttttggcgttcctcggtaccctatccctatgaacacctcgctctttatcaaaccctctggtttgccattctccgccgctctcccggctcccatcccccccaaaggctctccccctgcttctatcccaggcggggctgagatcaaggtgggacggagacgcaaatcagagaagaaagagaaagaaccacccccgccctcagctcacaacgtggacggacacatgctttctggtgatattgacctcgttggtgcagatactatgttgagatccaagatttacgctgccaaggcgttgggcgagctgatatctttctgggacaagaatgagctaccaagcctttggccggcaattttggatggtcttaatgtttctgcttccacaacgcagcttgcctcggccatggtcatagaagagtatgctcgccaatctggactagagagcaaatatcgctcgtcactgtgtgaccgtcttcgaccgattctcgagggcgagcgtccagcttggtatgcagacattgcgtgttaccttcatgtcgcgcgctcccagtgtcattcattgttgaacactttccgggatcatgcgcatgtggcaccttcccgactgccaaccttggctgtggtcgttcagggcgacccagaagccggacctaatgcattttccttggcggacgctgagaaaattgttggtcctgactttgatcgactgaagaaaaacctcacaccggctcaacgaatcactgctacccaagttttgaacgacacccgtacaaccgcacaatccgccgttgaggaggcacgattgatgagggaacagcgggacatgcgtgttttagctgccactgctggtgccttggtcgcgttgcgggatatccccaagaagcctggtcatatcatcaagggcatgatggacagtgtcaagaaagaggagaatttagaacttcagcagcggtctgcgacagcagtggcaggcctcatcgaacactacacagccgccacgaagcgtgggccagtggacaaaatcattggaaacttggtcaaatactgctgcgtggacacttccgagacacccgaattcccgcacaatgtgcacttggagaaatcaatcttgtcgctacgcaaagaagaagaccgacgcgaccatccagatgcggccaaattcgaaagagaggcaagagaggcacggattatgcgtcgtggtgctaaggatgcgctggagcagctggcagtcaagtttggcgctgagcttttggagaaggttccgaatctcgcgaaattggttgaacggccattgaaagatgctttgacagaagatgatcttcctgagaacatcaccgacccagagaatccacttggtcaagaaattgtagatggtctttctacactgcgggctctactgcccaagtttgatccgggtctgcaccaatgggttatcgaccttatgccgatcatcgccaagggtttgcagtgccgactttctgtcattcgctacgcagcagccaaatgtttcgctacaatttgtagtgtcatcaccgtcaagggcatgacgatgctggtcgaaaaggtcctaccaattatcaacaatgggctagatgtcaatcaccgccaaggtgcgattgaatgcatctatcatctgatccatgttatggaagatggaattctgccctatgtcatcttcttggtcgttcctgtccttggccgaatgagcgactccgacaacgatgtgcgtcttctagcaacaacctcattcgccacccttgtcaaactggttcccctggaggccggtattcccgacccccctggcttctcagaagagctgctagctggccgagaccgagagaggaagtttatgtcccagatgctggacgtgcgtaaggtcgagccattcgaaatcccagtcgctatcaaggctgagctccgaccttaccagcaggatggtgtcaattggcttgctttcctcaatcgctacaatctccatggtattctttgcgacgacatgggtctcggcaagacgcttcagaccatttgcatcgtggcaagcgaccaccatatgcgggcagaggagttcgccaagagccaatcgacggactcccgaaaactgccttctttgattgtctgtccgccttctctctctggacattggcagcaggaagtcaagcagtatgctccattcctcagttgcattgcatatgtcggccctcctgcggaacggactagacttcagccccttctggccactacagatgtcattgtaacttcttacgatgtttgccgcaatgacaatgatattctctcccctatgaacttcaactactgtgtgcttgacgagggccatcttattaagaaccccaaggccaagatcacgtcttcagtcaaaaagttagccagcaatcaccgtttgatcttgtctggtaccccgatccaaaacaacgtcctcgaattgtggtcgctgtttgatttcttgatgcccggtttcttgggaaccgagaaggtcttcttggatcggtttgccaagcccattgcagcgagccgtttcagcaaatcctcttccaaggaacaagaggcaggtgctttagcaatcgaggcactgcataaacaggtcctgccattcctactccgtcgtctgaaagaggaagtcttgaatgacctccctcccaagattatccagaactactactgtgatccgagtgaactgcagaagaaactcttcgaggacttctctaagaaggagcagaaggagttggcagataaggtgggcagcgcggaccgtggcgacaaagaacatatcttccaggcgcttcaatacatgcgacgtctatgtaattctcctgccttggttgtcaaggaaggccacaagcagtacaacgaggtgcaaagcttcctgacggccaagcgttcgaacatcagagatatttcccacgcgcccaagctaactgccctgaaagacttgctggtggattgcggcattggccttgaccacacagcagagggtgaactggatacaggcgcaagctatgtcagcccccaccgagctcttgtgttctgtcagatgaaggagatgttggacattgtgcagaatgatgttcttaagaaactcctcccatccgttcaataccttcgcttggatgggagtgtggaagcaaccaagcgccaggatatcgttaaccggttcaacaccgaccccagttatgatgtcttactcctgaccactagtgttggtggtttgggtctcaaccttacgggtgcagataccgtcatcttcgtggagcacgactggaacccacagaaagatatccaagctatggaccgtgctcatcgtatcggccaaaagaaggttgtcaacgtgtaccgcctgatcacacgtggtaccctagaggagaagatcctgaagtaagtcactactatcccacaagaaccccgcagatgcacaaagactaacgtgatccccgccacagtctacaacgattcaagatcgacgtcgcctctaccgtggtcaatcaacagaacgctgggctcggaacaatggacacagaccaactacttgacctgttcaatctcggcgaaacggcagacacagccgagaagccaggcgacccagccggcaacgaagtcgatatggttgatattgacggcgaagtcaaggagaagggcaagaagggctggctagacgatctgggcgaactctgggatgaccgccagtaccaggaagaatataacctggattcgttcctggaaaccatgaaaaactgataaatactgcgccgcccatccccgattcgaagcttatcccagcctagactcgatgtctgcttcgctttttttgcatctcagatgcatatctacccatcttccgctcccctgcgtctgattcacgttttcacatctcttcgactcaaccctcccccaaaactcccccatatcctcacaaccccaaatgattgtcatgcttaatgtcactgtaccattctccgtcctataccatggaaacttttgtctgcacggcagaccggagcataatcgcttattcattagttctaccgctgggaaggccctctgatttctgctcgttctttctattcttcttcgaacccttcatgtattgctagcttctttgatctctccccacaatggatggagagtctaattcctgtatgtgtacatagcaagtcctttattcttccccaacattgatatcttttttttttttgaaaagtcaaaaacggcgtaaactagcggattgttcactcgtcattggacatggataggatgcacacaactgacgatacttgactgcacggttttgatttggaatcttcattgaaaaatacatacacaaaaacaaaacaccatagcacctttccaatggcaatgataatagcccgaaagcatagctgcgaacgccgtatttcccaaaaaatgttgaccggagacagaggtggaagacaggaagaaaaactaacaccagccacgaaaagaaaatattccgcgaggtggggaggctccgaagaccctcaaaaatgatagtgtagatacaaatcaagaatggaaatgttgatacgttgacaccgcagaagaacattactgcagcgtgggctggactgcaagggtccagaaggcggaaaacaagatatcaacaaaaacaaaaaaataaaaaaataaaaaaaccaggtattaggttgatcataaggctgaaaaacaattcatcagacgcggcctaaaccgccaggtatgtgctcgtcagctcattccatgtttaagcctgtcccttcggcttcgaaagcatgttgaggcggctcatgctgagaacaccgcgactcttcttgctagctggagtaccgatttggccagaaggacgcacaggagtcttcgtaaggcgtttcttcaccggacttggagtaggcgggttagacttgaacctcttggtgctgcgctcatcggactgcatatcggcaggcggcacattttcacgatctgcagtgttgggagcatcctcatcgttgacttcactgcggtgtctcttcttattaagaatgccgtgagcaatgccatgagtcagcaccggaagctcttgatatggagcgggttgttcaccggcattcgatttgcgaacacgacgaatggacttgaattcggaagtaggagtagtggaagttgagacagccgagttcttctcgggagtgagggccgggagagtggggtagaccacaaccccgggcatggaccgaagctgagcggaagagaccttggaaggagagggtgaggcgatagcaagttcgtgacgagacttaacacttggagtgaattcaacgtgcttctttggcgaaggggttggcgcggagtcactcacatcaccagctcctccaaatagcgacttggggttgaagtcgggcgctgcaatgtgggtgccagaagcaattttggcagggtcgcgggagaagaggggttggcgccgacgaagaatagatctaaggctaccaagagtgggcaatttacttttgaggcgtgggttgaaatcagtgcgaggggttcgaggtgaggccatcgttttggcggccggagacaaattcaaagatggaatcattgaggttctcggcgccttgatgctggtagaggtcgtacgagcaagcgaagcatgtgtgggagtcatgatggaactgcgaacgtttgtgcgagggcgagggcgaggacctgcaggtcgacggggggtttcgaccttttgtgtttgatcttttgattcatgactagtggatttatcttcgatttggttgtgcttgacacgcttggatgctgtagcagccgtgggagtggacaattttgagatcttagtggcagggcgagaaggggacgagttctggctctctggttcgtcaagctgcgctttggacttggaccgcttcagggacttggtaacaggctggaagcgaccaggggtagcacggaaagatgaagcatgtccggcaatggagtccatctttctgaattccgccatgtggatgtcgctgaaacggttggccctgccctttggcatggcaatcttccggtccccatgaattttctcggccttgtgatcttcacagtcttgctctgagttgctctgaaccatttgcgccttgattcgagccgcgtcagcacgaaggctttccatcagcagtttggcctcttcgctgagttccgtctcctgggattgaaacttgtactcgaaccctggggttccgaactggtcgatcgcgggagacgccttggatttggtcggggtgttgtcgctgatgccgtgcttgactatattgccattggcatctttcttgatgggattgaatccgaggagcaggcctgagtctgcatgtttagttgtgctctgttgggctttgctgggatgcatttcttcgcgggacggacgagccgcagtcacactagtaggggtcctcatactagcgcgctttcgttgagcggacgcccgaggagttttcgcaatgggagtttggatgcgtgggagttcggggtcgtcaatctcttcgccttcggcaacagagtgaagtctggaagctgcgactggctgagtggtcatgtcttcaacctgaaagaaaaaaaaacaattgaagttagtttaccgcgatttcgacgatcatcaggaccttaatctgtcccacagcaggcgtcactatgctactcacctccggggtgttctggcgacgaatgcgagcggaacggcggatcgccatgactgaagacgtgaatgcaaggaatcaacaaatatcaatagaatgcaatagccccaagaagcagtgcagggggtaaatgggtcgagacagggtgtgggggaagcatcaaagtcgaagcgaggccaaaatgtaaacaacgcgcttgacgtcagatgactcagctcagcatcgtcctgacctcgggagcaacctttgtactacggaatacaaactatcgctaactacacattctcgctcgcatattattctccttaagaagtcttttatattgatttagttaactaccatttatcttaatcctcctagatgaatactaatacagtttcatcttgttccaatagtaaaaatacatagcaaatccttccaaaaatcgtagaagatgccacagtgactatcaaaagctggctaaacttcttgtcacaatatagaaaaaacaaagttaagcatggtttccatgcaagtgctcacgcaagtgctggcgccagtgctcatgaatgtgcctctcggtatcttgagtagcggtggtctcctgcgtagcagcctcttgagtagtagtggtgtattgcgtagtggtggtgtattgtgtagcggcggtctcttgagtagcggtggtctctgacgtagcgacagcctcctgaggagcagtggtctcttgagtagcgggggcctcctgagtagtagtggtctctggcgtagcggcggcctcttgagtagcggtggtctcctgcgtagcgacagcctcctgaggagcagtggtctcttgagtagcggaggcctcctgagtagcagtggtctcttgagtagcggcggcgttctgggtagcggcctcagcttcctggccccatccagtgggcgggttattgccgggcaatttctcaagaacaccgtcaatctgctcggggactaggttgggaatgttgcatgtagttgaggcgtcattgatgaaaccagcatcagcgcacttgtccattccagaatccccagcatcacagttatcaatgatcttctgcaagaccgattcatcccagccagcgatctatattcgtattagccagtagtcccagacatatcatcctgtaatgcaaatagatatactcacaaagtcaccatgaagcgaataccccgtccgatcgccgttactgagaatgaaaggctgcgagccggtaccctgggtccacatatcggcaaacagcggtgtgttccaatacacctcgtagaagatatggggaacgtggatccaaccctgtggacagttcgccttgccaccagtggtacccttgctactagggaataccatgtttgtcttgtagtcatcaagcccagcctcaggattgtagcacgaggggaaatggatatcggcacgcaggggcgacgcatagccatcgcagttcatatccgggaagccagcgccagcaccggcattgtttggatcttgaataccgacaccgtggagtccatccgaatccggtgggtaggaaggcacatcgtaagaagagcgggggcatgtgaactggacaggttggatagttccctggttcgtgtcgaggacattggcggcaccgcctgggggtggtgtacgtagggagctgttaccgatgaacatgcgcagaccgacagggaaagctttgatctcgtcgtcggttggctcgaagaagtagtagacattcatgtagaacatcgggaccgagaggaagctaccattatcggcttggaagtatagcgacggagtccagtagttgctcttgtcggcatcgacgagggatgaggtgcagttggagtccagcagggcatcgtctgtcatggtgaggttgaaattgcttcctccctggatggcgtgcgagtgtgaagccgcctctccggggttcataatcggatccatacgacccattgtcaggggaccattgccatagaaatggttcacggcaaaggtacgcgagtcttttgcgagtgctaactcgaagaagaccgcggaggtcacgagagtgcacaaggccttgacgtgcattttggaagtatatcggaagaatcggttgaaatagcaatatgcagcaacgagaaggatgcctcagaattaagtagaaatgaacggcggctgctcaagtaccggactcgaggtaaaagaatggaatgatgtttggaactcaacaaaaagaggaagggccattgttatataccagggagaatcgttctcatagaatatcctcgtcaattcgttctcgtcaatcgttctcgtataatcgttttcgttctcggtggggagtttcttcgatagttaatggagaatcagggtccaggccaaggactccacatggtgtcaataggtgattagacgccttgttaattgtgtagaaggtaatgggtgtaataagatgaggagggtgtttcagggtagagtgttttgaaacgtggggctacgccttagggcacatacagttacctaaaggggattggcggagaggatgataaatcaaatcccagactcctgggaatcgtcaatttccacatgtacttttcacatgcataacttttgtgacacatcatatgattagagtggttgctaaatacggtggatttgaggctattcccggaaagtgtacctgtcatccctttccatatacttcgtttagtaaatcacacagacagtaggcgtagtacggagtggtagtatgtagaattcattgatactaatcccccgtgaacattatatacactcatgttacagtttcaccactttgcccttatcaattctttcccccttattgaaaacagactagtctttatccgcgttaactctccggagattaaaaggatgtttaggaagaagactaggcattaaggtagtccactagttaatttaatatggatatccggtgcaatgctatccggtgaaatccggtgtccttggtgggcttgctagtttgccacgatattagtatctttgctagctctcctttctcaaggaatccacatattgttttcttaaagatgcccacaatgtactccgtagcattcctagggatacacccaagacacatgttcaggagtaaaacctccagtaaatattattcaagagacaaattatagttctgattcttgttgcaggaaataaatacaacgaagaaataaagtctggtagcgagcaactctgtaggccaatgccaagaccttcagcctcgagtcactcccgacgtctcttcaattcaactcctgactactcgctgcttagggtggcatcatgaaataataatgagccccgatggaagaaagagaaacaatgtggcacttgactctcaccctagagtaaaaagggggagaaaaacaacttcctgttcccaatgtcacgccaggaagcaaaaatgtaacagagaactgccttgctctcgttgtattcaacgcggggttcctcaactatgtcaatggccagagaaggaaaagtgccatgcgatgccaccagaaagagtgagcactgcaggtaccggatatccccgcctcaaaaacgtagatcatggctaaccatatagcagatacccagggcacagaactggggcagttgtatattgcccggggagcacctagcttcttcggtaattcatactttggccaccaggtggcagcccgcatgattcaggagtcagcccccgatctgcccccgatgagtttgctgtctagcaaggattctttgcaatcgtttcggaatgactctgggcccttttcacaagtgtgggatttacttggtctattaccgcggaataaagtaaccgtggatcgactaatcgagaaattcctgaccgagatcaactgggttatcgacacagttcaccccgaaaccttcagatctcaatttgcagagttctggggccaaaaatttggattcgacgaaattgctggagtagatcttcgctggctcgctcttttgtttattattctcgcttttagcgtgctcttggacaaccctactacttcttcgcccgaaaagcggaaagaatgcgaagaagcctctcttcgtttctactgggctgccaggagagcgatcgttatctcaccctcctttcacggcgagagcttagatcttgtcagggcagggttgatggttacgcgatatctgttatacaccagacaagtcgcagagagctggctcaccatcagctttgccatgcgcatggcccaagcacaaggcatgcatatagatggagaaaaatgggggctatcgagaaaagccactgaaactagaagacgtctttggagcaatctgtacttgcttgacaagactattgccctcgctctcggcagaccatacgcgatctcggatcatatgtgtctcatcaaagcccctgataatatatggctggatgggatgtctgatgaagagtcctctcttgctacccctcgtccattgagctatcctacgatgagcacagtgacactcctcggcagtggcttaggtaaaatcgccggtgaaatccaagaccgatgctttggtttatattctgcatcgtacgatacggtgattgagatggacaacaagcttgttgcatggaaagagcaactcccgtcctactttgccgtggaagaccccgagctttcactggatgagtcacatacatttctaccttggcatcgcctctacctgcactctgctttccactttgccagaatcactctgcacagaccttatcttctgcgcgagtccatgaccaatcgcttcagccttagtcacgaggcatgcatctcctcggcatcttccgatctgaagatccgattgcagtctttgaactatggaacatcagaaaatatgagatggacactaggcacccacaatatgttcaacagtgccttcatcctgggcattatcgctgtgcggcgacccattgctcctcaaaccgcggcaatcttgaacgatcttgaggaatattgcgaaaggttacggaaggatgtttggctaaacgagtttggtcttgcggaggtcaaagtggtagagttgtgtataatccgtaccactggacttgcccaagttaccgaccagccaggtgatcaagcctcaatgagtccacctgaagtaatgccagactttatggctcaggagcgcgaaaggaatccaatgatgtcgacgcccatgaacattgagtccattgcagcgggtacctcggccaatcaaccacctggttcttcgcctgatatgatgtggcctgcagtatgggaagatcagaactttgcatttccacaggctgctgatcttgaaacttgggagcaaatgatctccgaaattgcatatcacacctagcatatggaatttcttggggtcatttttgttgtacaagcatttgtcgatatatattctcggtttttatgacggatgtagcatctcagaaattatatgacttgatctcaatattcggtagtataaaacacattcacaggatatagcggaaatcgggatggaaatccccgcctttcttttcgtatgaccccgagctgacaatgcgctccctctcctccggtgacagttggtctcgcttcttgttgtgatatcggagcaaagcccacatactagcattgccacagaaagcaagacagatagcagcaagggaaacagaatgaccaaccacatatcgtccatttatcgatgacttgtaaatttgaccagccttgagttatgttagcttcaggtcaatgccacaaaacgagcacgccaatatgatattccactcacaatcaaaccggcgcaatttccgatagtctgctgtaggcctactcccatggcacgcttgtagtagccggaatggctgttggcattccaactgaccccaagtccaaccacagcatagattctagaagaaaggttagtaattactcgacagatactccaacggaaaatacatacccagtaacacacacatatgtcgcaaaatagagcacacctcgtttatggacatccactcccagcagcatggcatagccaatagccgtcactagacacagggggaccatgaagatagctcgcatgcgcactcggtcggagagatttgcaatgaccaggtaaaacgcggaggcccagatatacacaggaacagtgagcagttgggtcttgaccgaatcaaacccaaaccctcggatgatagtaggcaaaaaggtactgaacccgaaggagcagatattgacacagatttggttgaacgaggtgagccagctcttggggtctttgagtgtcttccacacttccttgaaatcaaactcttcagtatcagcataccgtgctgactgttgcatgcgcatgcgcatcagctctttctcttcttcgttcaaaaagtaggcagtttcgtagttatttggaaggaggaagaacgtggcaatgctaatgaccgcgctcatgatgccctccacaatgaaaagccacctccaaccttcaaggccgcacgcaccatctaggcgaatcagtccaaaggcgagtctaatgttcatgttagccattgttgttcggatttgtttggcagaatagggagagttgcgcatacaatccaccaaagcctccactcagagcagcagacacaaacagatatgaaattctctgtgcttgttcctcgcgcttgtaaaaggtagtcaacaggacggtcaagcaactgcacagtaattagcttccatccaaaacagatttttatcaaggcaatcgatagtctcacgggaatagaccactctcaaagacaccgaggaaaagtctggtgatataaagcccggcgacattcttgataaatccagcagacaatatggatgcactgaagccaaggatcaatgcagaaatgagtctgtttgggcgtaatttcttgaggagcatagagaacgggatctcaaagaagacgtaggtcgcgtagaacaaagacacggcatctgggtattgttagctatagcttggaatattggacgagggtaatctcacttcctagttcatttccaactaaaccaagatcttcctgtaagagctaagtcagtaacccactgcttcacaaaacgtggactcgaccttaccggcatgccagcaacagctgcatttctagccaggagttagcgataggaaccctcgctgcatagaggaagaacttaccccaagttgcttcgatcaagatatgcaaccaagaaaatgagcatcaccaaaggacaaatgcagagatcaagcttccatagcagctttctctctcggatagggtcaactacgaagttgcccatctgcacatcgtgatccgaggatagatcagcttgtttgatatccatctccttgttcatcttgaatgagtatgtagattgaccgtatacagaatccatccctatcggttcttatatatggaagttgtcacaagcgttatcaatgatcgggaaatccttcggtttattcaagcactcgacgaaagtaagacgaagaatttcccgaacattttaggtggccatgaccaattaagtttggtgtcatggcgagagataagctccagggctggaccaaggcttttcgtgcattagttcgtcccatcggggcactttaaccttaaaactttaccataatcgcgcatatacctaggtatatctcacctttcctgaattatcactttttaactgcctccgacgtttcaatgatttcccacatggcttacaatcttgcccaggggtatattagctaatcgctatcttttaccgacagggatttccccgcgttttatcgtcttggcgtcggcaattgtgaactctaatttatcttatcttccaatttcccgatcaatttcccgacgcgaggtatggggagactgcccattgataaggagacaaagcacactcgcactttttgccattcagaaatattttatattgcctatctctcgaaatgggaatttcgaacatgaacggaaccgagttcacagaaaccccagcaaaacatccagtaagtgctttgccaagaccattactatgttggagtgatctaatgtgctataggtttggaagcgatgggttcgcttcagagctgaagatggtaaaatatatggtggggagccggtgaatccggatattgatggtatggcatactctcaagttcatgaaagctcaacccctactgacagactcatagtgggtcaggctatagaaaagaatgccgaagtaccagtcaaagtcgtggctggtaactcagcattcgattatgatgctttgttcacgggtgaaatcaaaaccattgatgaactgctatccccggtctcgcaaattgaagctggggctgttcggtgcatcggcttaaactacaaggagcacgcagccgagatgaagctgactcttccaaacacgccaacgttagtatatctgcccttgcctctaacacttgctgataccgtccagggtgtttctgaaggccagcacttgcattgcatctgcatgcgaaccgattgtacttccttccaacgtggattacgatgaagcggactatgaagttgagttggcgatagtcatcggcagaaaatgcaaaaatgtttcggtctccgaagcagtccactatattctgggttatgcagtcgccaatgatgtgacagcccgcaagcatcaagagaagacatcacagtggtcttatgcaaaggggatggtatgtcgatatagtcaatgtccaagatgaacttcacaactaacctctagcaggatgggttttgcccactcggtccatgtatcgtatctacagaacaaatcccgaatcctgcagtcttgaacttgaagacccgtctcaatggaaagatcatgcagaatgaatccgccgatgacatgatcttcaacgtgccagaaattgtgtcctatgtttctcaggtacataatgacatcatctcttttacgcagatataactaactcaagtattagggccacacattactacccgggaccgtcatcatcaccggaacgccgtgtggcattggtatctcacagagcccaccacaattcctccagcctggagatgagctgcgaataagcataagtcatgggttaggcactcaaatatgcccgattgtgagagattgagcattgcatcaatcatatgtttttgatccgaaggtgattgcaggaatgaagtcgtcgtgttacgtactttgaattgggtatggtttcttatattttgtaaagaaaggcagcattatattaggctcatctacgaaattgtagcaattcatgaaggcatatttcaccaagtgattcaagctgaaggtgtcgataaatagataaagacatttcctggggagcaggatcctagaccaacgctgtgcctatcccataattgtttccaaattcaaatccatcataatatccaaccagaactcttctacaccagagtccgcacggtcccaagtctcgtgcacaacgttaacaatccgttgcattggcagctttggtaagattaaaataagttcagacaaccgcattttaacctttcgtctggcctgggcaatttcaacgtccagcgtattcagactggtaattgaatttcctgtggcgcccagaacagacccagacgagaaaacaagatcgctagagatgcaagctaaaactacgggctgcagaaccttcgttccagatgttgaaggaagctgccccaaaagggatacaatgtgcaatgccagggtgtgtcgtgtgtcttccaccgaacacgacgaccattcggtagctattggaaacaacaacaaaaagagggccgggataggactttccccatctgtggtttgattacttcgtagtcgttcttcaaggatgtccgggaaaacatggtaaatttgtaatagtgccgtacagcgatatgcctcggctaacgtaagaaaatgagacgggggcgtgttcgtatcaccgatatcgacaggcccacaatagaacgagaagccagtgaagagaattttgtcctcaagatgttcggctttctgtctgagatcgagttcctcggccatggagctcaagtcaatcaaggtgggatccaaggcctctggccttcggcggtgggaggttcttgcggctcgaattactctcgcagtccgataaaagaggctcaatgcatatctgaaagaccctgtccacgggtgtggtaggatctgcccatcgacaagatagactgaaagatctgtgtcgctgttttctatagagctttccacgtctataataggcgactcctctgccacaaaggcagctagtaagttccaccaaaggaggcactgtttgaaaagtggatgttgttttgcgagggcagaatttgcattcttgcactggcgttcttgtcgcataagatggtcttgggccgctctcagatatggcagccccaaatcagaagcatcgtgccacccagtggtggaaccaatcatgagcagtgcgaggaagtactcatcatcctttgcctgagctgaacttttttgagcactagtattcagacacgcaattgcttgctgttgtgtctgtattccaattggtcgcatgttgggaaaatcgttggccaacgaggcagctgacatgctctggatggcgaagtaaatcgccgcatttcgactccaaagccgactcacaatagttcgaaaaggattgaggggacagtcgaaagatgaccattggttacagactgtatgaaagtaatattgcaccaacattactggtagttggatgagaaaagaggggacggatgtgttgaccagtcgttgacgcaaaaccgacaacccatctagttcggcatcaggattcgttaagcccgtatcattagatcgcagctcagtgtagaaccaggcatctgttggctcatcaaaatccggcagctgatcaaagaggtttgagcaggtcgtatcccatatactcggggttccattttgaagattgtctctttcatcctgtgttggattgttcacttcgaaaagttcggtcgcaaccgtttcgggagattcaatctgtgcagctggctgttttggctcttcgctgcctttgaaaacatatcgccactgcaagctctgcttttggtaaccggggcatgtgtgtcctcgcttggtgcattcctgacaacttggctttgcctcgtcacatctgcgctggataagtattactatatgaaatttcaagaggccttcgtaggtgaaggataaattgtgttggtaagaaaatctttcacctcgacttactcgccgttgcttgcacctttggcagcccccttttgactttggtcggcaccggttgggattctgccttttcttctgcggagttgatttctctgtattttccattctacgcaaagcaaagttattgggaatgttcttcgctgagagagggggaaacatcaggctgagatatcggggcatcggatgagaagccgatcaaaggatttgaagaccggtgcatgaaccgagatccgatcacctgccgataagcaacgcctcatctctgctgatattcctcccgatttgattgaagctgaattgttgaggttgtctaagtgataactatttccccgcaccttccttttgctctactctaaaaaaggatcagcaacacgcggtttccttcccttaatgcgaactagcgcctcctctatatagcatacgtgttgatcagcgtgtcaagcatttgcagcaaggaatttctcattcggggaatatcttgaccttcgggtcatcagcccctgagttggcccggagagatgtatgccacaggtcatatatgtagctttcacttcaatgacatcaagtacaagtgctttaagacacaacttgcatataaggggtatgtgtatgtgcatatgcatatgctggagttgatatgatagagatttcaaaaaacacggcatattctgacacaatgcttgggaagaagcctttcactactcttgatggaaaaaaacagaatccatattccaactctccgtcaatggcaacttgtttttcagttggtttctctccgcaccgtatcatgacatcatctatgcggagtagtccatgttctctcatcttagctttctccgtattgtgaggggaagtttaccggatatctctagccgttaagatcattgatgttatgatcatggcctcccggttcggatatctggcaatatattttatcaataccaactgccgagctgcccattgattaaagtcacctatctacgcttccagccaatcaatacccatcgctacccatatatctctcacaattccagtcctatacggctcgagaggggattccggatcatcaggacctcgtgatccacatggagtccatattcggattagcgtagccgccgtgcataagcgtcaatactctaacctatctcgtactagtgttggtgggtaaacaggagaggatcatcgatgtttcagctgagacctattgtcggtccaatctcactgctcgtcttatcttcacgtcatatgtaattgcataggtgcccagatagaatccccagttaaacgttatctcggcataaatccatttctccactcggtggataccgtgtttgggaacttgctccggggagatatggaataacagattgagtgaatttcctcctcactcgtaaatatggtcagttttatgaatatctgcacctcccctcaccagaataggagataaacagcccgaactcctaatgcttattgcgtccgaaaattcctctgtaggttttatccaactatacccaagatttgactatttgaaacttacccttgttatatcttttcatcctagaggattattcactctttcattcctcatcccgcttttgttaaacctcgatcatggcagacgatgctactgccaaccagcgtcgttcttcaaagagcaaaggctccgaggcctatgcacctgcggaataccctaacatcgaagaaggcaaacaatcgtcagcaaatggggtactagaagccctgggctatgagcctgaactcattcgaaaccgctccacgcttcaggtggccttcatgtcctttgtgctcgcagcaattccatacggactggctacgactttcacctaccctcttgttgggggaggccctgtcaacataatctggggatggcttgccgtttctttgattacgctatgtgtggctgcttcacttggcgaaatcacctcagtctatccaactgccggaggggtctactaccagacttttatgatatctccaccgtcatatcgaagaatcgcctcgtggatttgcggatggtcatatgttgttggaaatatcaccatcacgcttgcagtcaaccttgggagtactctattcctcatttcatgtatcaacgttttcgaatcctctccaggagtaggaatcttcgaagcggaaacgtaccaagtttttcttatatttatcgcagtcacattcctcgctaacgcaatatcgacatatggaaatgcatggctgccttaccttgacgtatgtctaaaccataacccttccaacatcgcttgctaatacagaagctagacattcgcaatattcgtgacatttataggagtgttggctattgtgatatgtgttcttgtggttgcgaaagagggtagacatgacgccaaatatgtttttactagttttgagccgatatctggctggccagcaggctggtctttctgcgtcggacttttacaggcagcttatagcacttcttccactggcatggtgatttggtatgtaacatgttttgtttcccaccccagatgactatctcccatctcatttctactatgaaacccctatatctgacgcgtcaaaagtatgtgtgaagaagttcagcaaccatcaacacaagtcccaaaagcaatggttggaacggtcattctaaataccctcgccgggttcctcttccttattccattggttttcgtgctccccgacacaaaggttttagcagctctcgaatccggtcaaccagttccgagtattatcaagtccgctgttggaagttcagttggatcattcctgcttctcctaccattgatattgctctcgatgttctgtgtcattggctgtactacgaccgtctcccgaagcacctgggcgtttgctcgcgatggaggtataccaggctccagatggtggaagcaggtaaacagagacggcgtacctttcaatgctatgatgcttggcatggttattcagatattgcttggctttatctacttcgggtcaactactgcatttaatgcattcacaggcgtcggagttattaccttgactgtcagctatgcttgcccaatcgttgtgtctcttgctggaggtcgaagacacataaagaatggccaattcgatcttggcacactcgggctggtttgcaatattgtgacattgggtaagcatgcacgatgtgggcacgatttatcgctatcgctaatgcatattctagcatggagtcttcttgccattccgctattttgcatgccttcttcaatccccgtcgctgccgatacggtcaactatgcaccggtggtgtttgttgcatttatactaattgcttctggatggtactgggtttggggctacgagaagtatgttgggccgccaacaatggacgatgagtttcgctcatcagacttgtaaagtaagagatttggagtaagaagctccaacataaatctgaattcgaaatctatgtgtatcttttaaagatggcccagacccctgaagaccagggcccgggctaggccctgcgccctaaggtgggcacccggccccggccccgtagctttcggctgactaatattggtccaaccaaggtttattcccgctctcttggtttctgccaaaactactctcccaacttcaagtcaacgttgaagtaatactctgaccctctatttcctgacatatttgactatggaacccccaaagaaactcaaacttgcaagtctaggtagctcctttgctgctggtcctgacattcccccacaaatcgaaccacgtgcagcgttgcgatcaggacagaattacccccatcttctggcgcagcacttgaacgctgatctcactgatctaagcgtttctggtgcaacgttgctcaacataacagtcgatccacagtctactccgttcaacatgaccttcccaccgcaaatctccgacctccccgaagacgccaatatcgtcaccgtgaccgctggaggaaacgacataaattacattggcggcatgatcgccgatgcttgcgatgctgagctccaatcttccgcgtcactatcgcccagcgaattggcagaacgactagcgggggtcgttgatgagatacacaaacgggccccaagggctcgaattttccttgttgaatatcttgctgtcttggggcctggcactcaagctggtcgggatatcccgctgacccaggagagaattcagcattaccgcggtgttgcgtctgttctacaacatgcatattctgccgctgtggaaggtcgaaccgattggtgtgagacagtcccaattcaccaactcagtcaggaacatgcacttggtagcaaagaaccctgggttggagggtttgcatcggggccgcttctccatccgaatcttgatgggatgaaggccgtagcggatatactagctgagactatccgcaagagcacattatccaaagcattgtcgtgaatgtactcgttaatcaagcagatgagagcaggtttgagctagcaccatcatcgtgatcacccgattatatcatgctcggatcgtcctttaccacataataatactatttcttcgttaagaccacgtcaaatcttgcttgtttcgtcacacaaatgacaaatagcatcagctttcacatctccataatcatgacccggtaagtgtattggggctcctaaccaggtgaaagctaccaatcagaatcctgcaagggtcttacgtgtgatctggcgtaaccccgcatttggggtgagacgggaacgccgagagcttcttcccagccctctggtaactcaagccttcttatagacaatcaacattggcccttgctactcactttaacccttataaagatccctagagaagaacaaggacgcttgcacggctgatacgcttgtagcatcgaattttcggttgtaatcaggcagtgcaaacatacgatgcgcatatttgtcgactgtcggtcaaggccatgcatacgcggcacttgtcgcccgtatagcagacaaacacataaccaataggacgagatttgccttgaatgacgggcgacctagtcgagtaagcaaccagtagtgctaacaaatccaagcggtcaatgcgagcgttgcccttgctgtcttgagtcatgtataacgtgaatttgatggtttcttttgtcaatatggcctacattatgctgcgcgttttagccagaagaattagccagaagaaaaaaagacataatacacagtatttttatatacaacgtctttattgtcggtcactcaagtcctacttgaattacatccggaagtatctctgtcggtccgaaaacctcgggaagtcatcttccgggtccacggcagaagcgaaacagtctcttcaaatgcatccgcgagttttgttacaaattagagtgtattgactgccacttatcaattggtattttggtagaccacccctccaacaaggccgtgatatccggaacctcgacaccgttcctctccccgccgagctggaggagcgtgtacaccttgcgtgtagacctgacaaacactggacaggtatacaatagactgggatttccttcttatttaacagagctattccgcgggccacttcacatggccggatattctcgcaacataatcattccagacgaagaagccttttgcagcagcagcacctcggcaaggtacaacataattgaacgcgcttggcgccttggcataaaaagatcatcatcgctagctctattactgtctacagcgtgagttatgcagtgtgagacgaaaattattctctttcccagtcgaagaaaccgccgacgcaaaaaccaatagacacatacgccatctcgaaggtgtgcggtgagaacattgcgagtggcttcgcgcgccgatgtggaatcgagtcgcgacatctatatcctgcgcattggcctcattgtggccccggaagagtaaagacaggctatgttccgatcatacgttgaaaatcctgagcgctgcatggctgagcatatatcgatgatcccgatctcgggttgccgttggggttcagatctttaacgctgtcaatgatgccattacgaattacgagaacttcctggcgcgggtagagagactgcccatcggtaatcagaaaaccaagttgcttgtgctagcgaagagcatcattggacgaagtattatgaatgaagagaaatcaattctgattcgtcatgttcgtaacaggggcccttgtctttcatacaaatgatcggggctagggctatgttagtaagcagatcacgcgccagttcccgatgacatcagcctcgcttccaggacaacgcttggccaaatcagggaggtgatattctctccacgttgcagcggtatgttctggcctgtctttttcaagttcaaatacgaggtccgcgctgtcatatgcgacctggaacaaaggatgcaaggacgcaaggccctctaattcaccggatggaaaaaggcacctatgccgctagtaaacaagtttttctccgtggcgcaatgaagcgggctatgatcctggctatgaggctagaaatgttcggcaagcgggctgcttaccatttagccgtggctttttaccgagatactttcaatatcttgcccctgaacctcatctgggaggtttaaggtgagacgttgagacgttgaaataagttcgtcagatggtggaacctggaggccacgacttgacaggtcacacaatatggctactcatgagatctggagagatttggcgagagaaaaagagagctccaatcatgaagtcgcgggctgggaagcgaatccttttgtttttttgatctctcactactattaccacatacagcatacattacacccacatactttctattatgaattcatatcatacgttacttctatccttacggggagtctgcacaagtccggggtaccccgatcgtccccgcatgcaatatacggccccagcttcatttcctttgcttctttgtccttttttagtattttttctttatttctttcatttctttttcagggctgggtctcccccaagttccccccccttagattctcctatattccacctcacccgcatccacttacacctacgacacacgtcatgctattctcctaatactgactcaacgccatgggcgatttcaccgccgccggggatggcatcagcggtcactaccagggcacctccctaggcatgcagatcgccatcgcaactcttgctggtatcacttggtacaatgccttcgagctaatgatcctcctctttgtcaccttcgcagaatatcgaggactctacttttggagtttatttatttcctcctccgctggtctacttccttactcgctgggcttcatgctcaaatttttcaaaatcaccgagcatcttccatggctccctgtcactttgctcacaattggatggtggtccatggtcaccggccagtctgttgtcctgtactcgcgcctacacttagtcctatcaaaccagcgagtcctgcgtcgcgtgttgaccatgatcgtgatcaacgcaatcatcctccatcttcccactacggtcctcacctacggtaccaacatggctagcgacgccaccctgggctcgtggacgaaaggctacaatataatggaaaagatccaaatgacaggcttttgcctgcaggaattcatcatttcagggctatatatctgggaaacggtacgcatgctacgcctagacccggaccgtaccaagcgcaagattcagtaccaactactggtcatcaacttcatcatcatcattttggacttgggcctgctcgtcgccgagtacttggacttctacatcatggaaaccatgctcaaaggagccatatacagcatcaagctaaagcttgaatttgccgtccttggtaaactcattcacttggtacacaatcacgtctggaaacccgaatcgttctctgcgccaagcgaactccccgattttgtcgacgcaagccgtgtaacctccgatgtgacccgtgccgtccctggtgtcgttcaacgcaggccttcccggatggaagctgatgacatttctatcgccttgttcgaacatttaccggccgaacgcatacgaaccaattccggctcgtggagcaatgaagcccgcgcttatcatgtggatcacctcccgatcgactttaccaattctctctgccattatccgcgtcaccaaagtcgtcgcggacttctcgagaaaccgggatgagaataaatcctgtcacggcaatatcctccgccttctttttttatgaatcgcggttcatgagatacgatcttcattctccgtgaacatcacacatggatcagtcttcaaactggtctcaccctcgacatctccgaggaaactcaaacttccctgatccaaatatcaggcctcgcgcccagctccaggattcacccagcgttgctgtgccacagagccagtaacttccttaatggagaatccataaatacgcaactcagagagtgtagatgtgtattcatctttatttgtatataaacgattccctgtagttatgtcgattgcacactcattctctctttcgaatatacagaccaccttcggttctgtgtgaatttatatcgctcttcggtcgtggcttccgtattactctgagtattcgtgcaaacaatattttgaattggggcgcgctataggccaatatggcaggctttccgagtatgtatatgttaacagtttcatatagctgcatacagattcctaatgatatcttcaatttggagcctactaaatattatggtctaaaactctccgggttggatttccatggatagaaagaactttagccccgataagcttactttggatagttccagggttcggatggttatagcttgagttttaaattgccgatgttccaaggttggatattcttaagtgaacgcttcttgactccagagatcctatgcccttccctaatatcatcataaatcaaatggattagactatcaaagtcagagaccgcctaagcaagcacatgcacttggagaatctagtcaaaggtatgttatatgtctcaaccgcaatataaatcaacaaatgcccgtcgatacaatgatacacgcacaacacaattcaaaagatggatggaaacgaaacagctcataaatcgtacatagaaaaaggagctagaggccaggtttctcctaccaccagactcaagacctcaaagtcccgaggctcgaacgcttaatctcgaatgctcgagatccctcaatcaacccatcagagaacttggtcacagccacccacgccggactgaactgtcttacctcgtcgagagcggggatgaggccgattcggttattgtcgctccatagacatgtaatgcggcccgtgatggagaaattgccatcggcctcggacgagtcatgctttgagaaatcgacatcaacagtccacttgttgtcccatgtacgactccacagttggatccggctcagaccatctggggacggatttatgaagcgttggtctggagcggaggagccaaccacactaaagtctgtgatataattgccgtccatgttgatacggcagttacgcgtattttggcctgatacttcaaagcgaacagatgaactgtccgattgagggtgggaaatgttgaaggaaatccagtccggcgacagctcggaagcctcgagtagagagtcggcaccctcgtttggaagcgatagagattcagggctggggacaacatgtggtattggtgcattccaggagcatcgctgaactcggttgctgcctcggaaaatccaatcacaggcctcattttggcctgctgcgctggggagcccgtaggtaacttccttgacaaatggaggcatgccagtcagcgaagcagtagagaccccattgtcgaggtcgacctcctgcaggaagaacagcttcaggcgattggagtctgcgaacgggaaggcgacaaggttgtagatcaaggttccgatgaaaacaaagagtaagaagataggcaggtggtatgtgtaacggtggataaatggcagaataggtgcaaataggagtacggtaagactggaaataaagagataaacaatcagctgggggttaccatcctgaccagtttggctgagggcgctggtaatcagaagagccagcggcacgatcagcatgagaatcacgggagctgtgataagcagctgtaacagccacgtccatcgcggcaacacgccactccacccctgctcgtcctcatacacgtttggatctttctcttcatcctcttcgtcctgttcatgagatccgcggtctaccccaacgcggacgtagttggcaaaggtggggcggtgccggccatgcaagagcgatgttgattcagtcaagtcctcttcagtatcatcgtcctggtcctcatcgcctgacgtagcaagccggcttccctgagtactaggccgtcgtgattcaaataatctagcagcgtattctgacttggttggcagagagaacaactccaaataggagatccatgtagccaagaaggtaccggcaaagtaaaagaacatgaaatagccaccagcgagcccttcctcgtgttcataaacggtgccaactaccatgagagaccaggtaagaacaaacatccaagtccaggtatagactcgatgaaaagctgatgggcgtgcaaagtctgcgatgcgagatacaaaccaagctaagaatatccaagctgagatcatcatactccatacggcgtatgagctgctatgggcaataaaagggttgacttttgtaaccatataagccaagccgacagtcaccgctgtaggaattaagagcaaaaacgggaaccggaagaaaccacgcagaccacgcaacgggatattgtcgtcgttgatctcggaatacaccgatgagcggaagagatacatcttatcagccctcgaaagaatgatactggtgataagtaatgtcaacggcgccacaatcagcagtgtgacagacaacgcaaagagtgtgtgcagacggaagatggcaaaagcactcccaaacagatcgaaccaaacagcccgggtacctgagccgctaggcacatttccatcgtcgcggagatgtccgtcgaatcgatcagtagcgtcagacaaaagctcctccgtcgtagcaacagcagtagagagcatgtgccaaagcgagtcgatattagtgtgtcgagcatcatcctgatcggtatgataacgagctcttggttcaaagaaagcgacatccaaaccgcgcaggcccaagataccttccaggacgatgtaatccgtctggctgccaatcaaacccttttcgaacccgttggcactcaacactgagccgaatgggtgctgtgatttcgcatacgcctgggtgacctccgtatccgagctgcggaataatgtagcacgccctccagcacccgcaccttccaggttcaggaatgtgtgtgcaaatagcgccatcggatgctgactgtacgcgcgtgcgccgttcagatagtcctcctcgccattgttgaaaagaaccaccaacccgcggcgcggcgcatgacccggtgtcaggaagtatttcaccagctgcaggcacgttacgacaccaactccatcgtctgtcgctccgtacccggtcgaaacgctatcgtagtgcgcgttgacaagtactcctcccttgccaacgggcactcgtccgggagtctcccaccaattctgcttactatcttccgagccgcgaatgtagaccaagatattggtgccttcaaagtaaacaccgacgcttttatcgatgaaagtcaggttagataccagatcgtcgaaaacaaaaacatcgggcttctcttccttcgcgtcgcggtattcctcggtggatgcggcggactgcttgatcgcgtcaatgcgttcgagcaaccacgagcggaccacgtcattctggtgcgaattgtaggggtgaaagcctgttgtcaggctttggagatcttgccatgcctctgtgaggttgaggccgttggggcttgtttggggcgcgggcgggacaatgtggtggatcaccagcaatgggataatcaaggcgaggtatacgaccgtggtgatgattgttactggccacggcgtaaatgccagaggatttctggccttctgggtagccataccctgtgctgttcaagctaagaatgaatgggtggtggaggttgaagttggagtcgaatttaaggcaaatgcgggggtggtaccgtcattactttacataactagctcatacatccgtttatgtacatgtgcagatcggctgcacaagtcgtgctactaacaacaactgcagtcattgatctgggaaatgagtgaaagaaagagatttggctaaattctatgcgattacacattgacgaaaaaataacccaagtccgtaaccgctagcgtactaatgcatttcccgcaataacacagaatgaaggataaggtgatctttactcatatgggtagagatatgtctgcctgtttgatctagctaaagatcatggatgaaagaagacagggaattgaataaaaggaagaaatgaaatgcgagagcctagggcctgggcttattttcgactgcaaagaaaggggtatcgtatcaagtattcaaagtcccaacgtcgatataatcatcatctccgtcgttgataacggttgcgttcatcagcccagtcatttggccttcatcttcatccagttcttcgtcgtcatcgtacatcgtggcttcggcttcttcttggaattgtggttcactttggttcaggtaatcccggagtcgattgacaccatcaccgctgaacacacagaagacgtcccgttgttgttgcgtgaactctgggggggcttctcggcagaatgcagtgaggttttctcgcaagaactcttggacgccggtcaaactcaaatgggtcaggcgtgggcagctattcagcaaagcgtgaataccctaagccgtaatgtcagtattgcatatcgtgtacatcaggaccttcgatcaagacttaccttcattctcaactgaacgcaataacttagatgaacacgctctaaactactgacagaaggatgatggcccatcttgggccgtgccaacgctaaaatactctgatcagtgatagcctgacatttgacgagcccgattcttcggagcttcggcaaggttgccaattgctgcacactaaggtctgtgaggaggttacagcaggccaggtcgatgtatcgaatgcggttgcaagacttgaccaggtttatcacggccgagtcggagatgtttgaacagtggcccaggtgcacatagtgaaggttctttcctagcctgcagatagccatcacagatcgatctgtgataaatcggcatttggccagtacgagattccgcaaacgaggagctgcacgcacgatccgctcaaccgagtcatccctgacattctcgcaagcggtgagatcgaggatgcgaagactgtcaaaggtcatttgcggaggtagcgacatgaacgcactgtcgtcgatttcggtgcattgtgcaagccgcagttctcggagataccggagtgttgtgagcaacggggtcactgataagctagtgacaagtttgcaatcatgcaagtcaatttccagtatagacgggcagttctcggcaaaggactgaattgcccgatctgatacattagaaaccccgttgagtttcaactattacaattagcgtttgcagtccaacaagatcccacatataatcatacccttttgatttgacgacacttttgcgatacaacaagcaaagcgtcgtcggtgacttttgaacatcccgtgatgttcaggccttgcagacggggacagtctctggaaaccgtggcgagcgtgtggtctgtaaggtgtcgcaattctgaaacatccagcgcctgcaaatgtcggttcccttccaccaaatccgacacacccttatccgtcaagttcttgcagcttgtcaacgtcagccgctcaatgcgcttgcactgattgaaagagacgatagttccatcgctaacatcatcggacagagcagacagattcagtctcttgataaggtctgcgtagttgaaaagactgtccggttttcccaacgacgtagttacgcttctcacattgctccaggtgttacaagtcggtcggtgccacagtatccctacagagtttgcagcccatccgcgacacaccagcatggaattgagcatatctaagggcgcaaccaatttcgagaaaatcgcgatcagaatctcgggtgggaggcgaccgatcggcggcagtggctgggatgtttcacttgacaaacgagagtcgcggaaattggcgacaccgatggaggattgcgagtcgttggcctgggccatgaagaaatcggtgtcatcatcggcgacacgttcgggtgacgtcgatccagacgtttcggaaggggctgcactcgagcaccgaccgtcttctcgtagtcgatgcatcttagtcggcgtagattcgctttttgaggttcgcttcaatatgttttttgggtgtcggtaaggttgaaatctcataactcagggaactttgcatggacagtgcatgtgagactggaactggcaagtccggtccacagatgcagccagtctttgttcagtcaacggtcctaagactttgttttgtctgaagactggtagatgaatgtaattttcgggaaatatctgcagtaaggtgggtgcacgagggatgtaagcgtggtttcgcggcgcgtatttggatggcaaggggaggtggacaagtgcagatcgttcagaataaagttgaggcaagctagatcatggccccatgcaccccttgggtaagatgcaaatgcgtaaccaggaaaatcaatgcaagtaaatgtgaagggataaaagcggcgatggaggggggatgaggcaatggggccgggtttcacagtgctgtggagtcagtgccaagcactgcttatcgctcgataagatgggagatggggtctgaagttagtatagccagcccttttggttatggaacttgcatgtagactctttataaggattcgaatggcttattgaaccagttaatattagaagtattcaaggtcgcttgatgtgaccccgtgcttgatctacgatcggtttactcaatgcgggaataccggacatctgacctcattaggatgtagaggaagccctactttctttcagaacttttccgacatgtattcaaagtgatctaataatctacttataaatatatccatctcagtagtaatcttcgtctaagcttctctcgcacccttcacccagtcacgcaagacgttcttccggattttgccagtactggtcttaggtagttcagggaccacttccacttctcgaggaatcatgaacttgctgattccgctactatttcgagcccattcaatcaactctgagcctttcatgtgcttgccttcctttactgtaacaaaggctttaggtcgttcgccccagtgggagtcaggaacagaaacaaccccagcctccaaaatgtcaggatgcatgactagcatagactcaagtgcaacggaggagatgttttcgccgcctacgcattgttagcaatctagtttcatggcagttgtccgctcgccacacataccactaatgatgatatccttcgcacgatcgagaatctgaattgcaccatcgggatgccagacagccaagtctccggagtgcaaaacacctcctgcgaataatttccgagttgcctcggagtccttgtagtaccctcgggcacagatatttccaacaaaaacaatctcgccaatttccttgccatccttgcgaacatcaatgatggtcccttcgggcacttcggtcttaatgacccggcctggaaggcttgtaatgaagccgtggccttggcgggccatcttctggtatttctccttaagagcaagctcgttccattctggcaaatggtagcccttggtgattgggccgtatgtctccgtcattccataaacatgtaccggatgtaagttaaggtcggtcatttgttcgaagagaagaggtgtaggtgggcttgctgccaccgtgacgtggacaggctcgggcagtttctctgcttctttcgcgttgcaaagcaaagtgttcacagtcggtgcagcattgaaatgggtgatacgctcctctttcagcaacctccagatttcagggtagtctatcttgcgtaggcaataatgggttcctcgaacggccgtcaccgcccatgggaacgtccagcctatatgtataaataaaatgttagttatttagatccatttcgttactcaaatgaagatgatccacgaacccatagcatgaaacatgggtagcgtccatagataacgggcacgtccatcgtggtagttcagaccagtttcaatgatgtttgccattgtacccagataacagcctcgatgagtgaactcaacacccttgggacgggctgtagtcccactagtatacgccaacgcaattgtcgaatcttcatcggcagcttgactctcgagtccttcccagccatgagaacctgtatcgatatcgtgcctgaggccttccaaaacagcttcatcgaagggacctgtcagctcaccctctgttacatcggtgtcggtatcgatgataatatggatgtgagggtattgggatcgataatgctccagaagtggaacaaattcctcgtccacgatgaccacttccgcatcaccatgatcaaatatataagcaatgtcttcttgtttcagacgatagttgacagctataaatgtgttagtttgattgatctctctccccaaaagctaacaactagcttaccgatgttaacagcgccggctgcggcaattccgaaaatcgactcaaggaatgcgggagtattcgggcacagtatccccactctcttgaatccatgtttcttgaggtagtatgccataccccttgctcggtctgcagcctcgccatagctcctgcgaaggatcttattgttggcggttacatggtagatcgcctcagcctgtgcaactctttgttagattgaagtactacctatgtaccatctgaaaagtgcttacattaggttcaatggcagcagcccgaggaagaaagaaagtcggagatagcgtatgggtattcacacggtgttcaatcgggggcgttgaacctgtgaaatggccaagcaggccagacaggcgagactttgagccagacatactacaccgtgagtgtagatttatggaaaaggggttgttaaacagaagagctatgtgtgatatcgacgaatgaagaggtaatgattggaattatacggggaacatcgtagagtcgggaaatgaaataccccaggaattccccaagttggggaaaatgcggggataccgctctaacctaggctatgcgcggggttattcgggtatcagcggcttggaaatggtttgatctacgttgtaccctcggcttcaatgaattacatattatggattggtctgtcggttgtggttgtgtggggacaagaccggcggtacggatccggagggaatcatccttaattttgggtggattacgttaattcatcttactcaggtatcactggtcagttagataatggatatatttaggacatgcggggatacacgtagggaagaggtgtgcatgctatactatgaatggtataaaaagtggtacgttacaggctatgaagtatatatataaaaaaaggataggtcaaagtattttttgatcataagaatcatgttgaactcttgaaaattgtttctttggattaaaccgccacggcgcgagtcaacggccagctattttgaacctttaatcccaatcgactccgtttttttcgacttttgaaaacttcgaagaccccagtccccgagccgtcatgtccgtcacagacagtggtattcatgagttagggaactgggctgcagaacaaggtcggccggcttgccgttcgaattcgctgaaagaaaaccgtccgcgattccatcccagaaccatcgctcgacacaacaaccagccgcgctaaaggtatctagtagccatactgagcaagctgggtcttggtcttgctgtccacattcgcaccctgctcggccttggcaaggacacgacgagcggccttcttgcgctcgtagtaagccttgctcttgacctttcggcgctcctcgagtctgtagaaatgttagaatttgtcgcttgacataaatcaccttcaattgataaatctgagattgtacatacctggaaacaacatcctggtacttccagccaacctcgtggctgagacggccaacggtgcagtacttgcggccgggacggagacgcaggacacggagggcctggggaacaacgacacgcttcttcttgtcgtaaggagggggaacaccctcgaagaccttaaggcgctccagagcggcggcaccacgggcggtcttgtggggcatcataccgcggatggccttgtagaggatacgggaaggagcgcggaagtggaagggaccaccacgggtggggttgaaacgagtcatcttgcgaaggtaggcgtggtacttgactgtagggcggaatttcgagtcagctctctgatatccaacttgcagtacatttcctctgaaagtaggcccaaaactgccatccaaaaactgccagtagtttcgatatgcgggtgttttccgtcgtgtcttccctccacactgattcacacagtccccaaatcacatagaacgcaaaggaaatattcgagaaggggttgaacgtacgcttcgcgcggaagaactcgccggagatgttgagggcctcacatctcacgacgacgatcttctgaccgttgagcagctgcttggcgacagtgctggccagacgaccgaggaggtgtcctttgccgtcgatgacgacctatttccaaacaattcaagtcagcgatagattcgatatgcacactttgcaggcgagagtggcggcactcaagtcgttgggtataaacgtaccactgattcaaaggaggacatcctggtgatcttatgtcccgtgggatggatgttgtcggcggttgttgtcgtgggtgtcaagtcgacgcacacaacgaagtcggatggctcgatgagaatgggctaagcgagggtccgctcactttgtgttaatggcgagggtcgcagccctaagcctgaccaatcatagaccgtaaaggtcacgtggtttgtctctcctgggtccgctcggcatcgtattacgtaatacttttatttctcactgtgcgccatcatggtgctcttttctttgtgccgttagggcattggcttagggctgatataccctgttcttgaaggttgctgtagatcaaatgataatcttcaagttgtaaggggggttggaggctttggtataattccaatattcggtgagattgttcacgttatactaatagacaacccgtggactatcaatcatctttgccttccacgtaaacctgtctgtgaagtagtatgtcttatcgtcttctcaattgtccgatctaatgatctagccaacttcaggtgggaacgttgggtccgatgactaagatatccatgaactcgtccacggacagatctcggccattgtttttcttttccccgaaagatctttcttctcacagaaataaccaaggccaacgagacttccactgggcctcatgttacactaatcttattcgcttacgattccatcccacactccaacttgattttacgatctgaggcaagggttctttctatactcgggtcatgcgacaaaagacgcgttttgtctgtgtctctgacacacacggatatacgccgtccgaagcgggcttcaagctaccagcaggggatgtcctgattcatgccggcgacttgacaaacaatggaagcctgaaagaactccgcaagacaatagattggatcagcaaggccgactttgaaatcaaaatcatagttggtggtcagtcatttaacttgttgtactggatataacccggcccttaatggcagtcatatcctcgctgctcgccaaattgcgtcattcattagcagggaaaggtcgattcagagcccctaacattttgaccaggcaaccacgatgtcaccttggacccggaattctacagagaacatggaaaaagattccatggccagcacctcgaagattcacaacactgcctcaaactcatcacggagtcgccttcggtcactctacttcgccatgagcccgctctgattcgtttaacgcgagcaggcggaccaaacacggtcttcaaaatctttgggtccccatactcccaatcccaaggaaattgggcattcggatacgaatcaaggaatgctgctgcgctgtggggtcagatgccaatcgatgcggatatcgtcgtcacgcatacgccaccacgatctcactgcgaccaaaagccgaatggaatgttcgtagggtgtgttgcgcttcgtagtgcattaagcctcatcaggccgcacttagctgtttgtggccatgtacatgaaggacgaggatacgaacgagttcgctggcgaggcaagcttactaacacagggacagagagagagacagagacagaaacacagctagaatctgattcagttgaccaagtcactcggggaattctgccacccatgggcagcaacaaacaaagcctagttgatttgactggcaaacgggatcaacgaatagacaacgaggggttttcgtatcccgggcaaagacagcatgatctagcagagactcaacccgtgtcatcagcatcaccagggtcagagtcatctgctagtattcttgaaatggcaggtccacggaactcgccgagcgctcatccgtccctgggtacgggtagccatggccccagtaaacgtggtttcgattacggcttgtaaacactaagaaaggagacctgcattgtcaacgccgctgtcgtgtccactagctggccgcaccagggaggcaaacggttcaattcgccgattgtagtcgatcttgaacttcccgtgtggcagggagaccacgcggtcgcgaataggtgaattgtttttccatagaatgaagcaaatttcggaaattacaattcagtcggccccatcgatcgtaacggcaatcttccctttgctttggccgtgcatggtggcttgacgccattctccctgatacatacagcaaccttgtgggctttggccctattgacaccggtagtcggacgccttgatgcatcatggttttaacattggtcggctagtgacttgatgcacgatgctaactgactagtgctgtcagattgtctccgcttacatcatttattaatttacgcgcattagcctcggtcaaagcaactcgaggataatctatactacgtactctataccgtagggatacctgtaacatattctaatattcgctaatttgatagaaataagaaaagaagaaatcaccgcaattcgctctcctctctaactacacaaacaccagacttgcctatgttgtaggtacccctcttgtctcgtgtataccccgcatgcaatggacaaacacatctgaccgatcgcaataacatcgagccatatgcacctgtgatatcacaactcgagttcttgattaacaccgtaagttcccaggtagtacgatatacacaagtcacctgcaacagagatctcctcaaactcaaaacttccagaaaccacagcgcttcgaaacgacttcttagtggccaactcccgggccgcaaagagcacagaaacatgagccgaccaatcaatagctcgacccgccctctccttgatacccgatgtgaccatgcgcggccgatcatgtattatcaatcaccggaggttgcctaagtgggagtctgtgtttgtgaccggttcttcagcagggatttgggactgggacagcgctcacactccaccctcgtgggaaacacatgcttctcgcaagggctgctgtttaggctggcgcattcttttccagaaggcgttgaatggctggacggagaggcctggccatatttttattctgtaccccctacgcaccatgtaatagccgagagtattattgcatgagaaggtagtactagacatcattattgcaggcgacttgcattgcatctgcattttcctgtttcccgggtacaagcctccaaccgtttcgagccaatggtgtataaagtgcattttagtacgtagtttgcatatctcgtacgttgtatgttgtatggctccgactgttcggtgcgattatcctgacgaaactacaaacacaccattaatccactgccaacgcccaatcgtggactcaccgacttcggtcctagtggggttgcgtgactgtcagggaggggtatctgtagatcacggtttaagcgtataaggttactaccctgtgtttcagagggaggcattgtgtgacctcgcgagcacaactgatgggatcggaggattatgggttcggctggtgcagtccggttggaaagagtgagagtccgtggtctagtcctggggatcgaccaaccccagaccgaggcaaggtatgctacaatcactatcacacaggaaactgtcaaatgacagagtcaggcagataagaataggagatacggagtatacaggtacaatattgaggcggaaatttgaggcggaaatttgaatggtgggtccttaggacaccttaatactaaatagaaaggtacaacatacatggcattcttagcaaaatgaagactatttaggcaatatagtcatagtaatatggcgtaactaccgagtacggaatatagagtagtaagataatgacatggtggtaatgctgacacggtgttcggtatttgcatttccaactttgtcacgatccgggctggcacatcagctccgttcaggctgtcagcaccggtctggaaaatgaatgcgctgcaaaaaccgcagtcccgggtctagatgatttggaaccaatggatgggccggaccgtccgagacaggggagtacgacgtagtttcatcgagtgtactgtaattgtctcatagtctagaaagtcagagtaatggttggaagatagggcccgaggtctcgggtgggggttcaacgacacgttgtctagttagtcaatgggcccgttgcgggacaagtgccagctgtgccagctgtaccagctgttttagcttaggggagattattgagattattgggtgcgaatgcctgaagagtccgttactgatgtaagatctagagatccccggtaataccgagggctgcattctgatataaggtgagaatcaaatatataccacatacagcatacatagttatatgaaacaatatctcactatatatagaaacaggcacattcttcagcgatggaacgcttcgggaaggtgggcattacaagtcaggcactgatttcgttacttatatctatggagtacagatacaacagtcaccacccaatcacacgtttcaggttaaacaagagagttagatatgactggctgaggtcgacaggctcaagacaaggcggaaaaagtttaaacagaaccaactcaagccggataaagcgaaagcagtgaggcgaccgaagctaaactggctaaaaacccgcaggcactagttggacgaaagtcggggatatgcaggagagactgaatcgagaagaagaagggattagcggcatgacgagttccaagagaaggcagacccgattcctatggaatcgagggatcatgtccctcgtgttatgtacttcatcgccccacgcagcaagccaaggtgctggtgaggcgttgattggtaggaatgcgagcaaatcggacgaagtgctcagaccaagtgaatgtcagtggggaagagaatgatttttttgtgattagatgattattctgacgagtagagggaattaggatattaggttgggcatccttgtctctgaacctcttttcgatgtctatgtgattctttataccgcgatattacatctcgaaataccgaccttctctttgtggcgcagtcactttcgcccctggcatatatcggttggctgggagcgagaacggacggcaacactgcggattttcattgtccaatttgtatggcaaatcgcccatccttttcacaattctcttcaattcctcctgcattgcaaatcatatccagtccattctggatcggtgtggaatttttgctacgtcaacgtcaggttgttgacattccatatcgcccaccgcctcttttctccccctctcccctcacctttttatctcctctcatcccattcaatctaaggcattgaaagcataccttgcccacaatgtcctcacccccagatatagacccatatgccgtgcttggtgtcgccaaggaagccaccatccctgaaatcagggccgctcaccgaaagcgggttctcaagtgccatccggacaagatccaagatgagtcgcagcgcattgctgcccaagatgaattccagaaagtccagcaagcctacgaactactctcggacgatgtccgacgcactaaacatgaccagaaggtcaagatagccgagctgaagcgggaactgttggaacgcagacgagcagacctgatgcacaactcctcgcggggaggtggatccgccaatcgcgaattccgcaatggtcacgtcgtggaggagagggccccaatggaatgcttcttcgaggaggcaatgcgattcacggacgatccacgacccatgtctcgcaaatttgaagagttcggcgtgcgcccaaagacgaagccgacagaagagaagaagaggactcgaacaccgatcaacatgtttcaccaagcgaaagaaatgcgggagacggtcaaagcgacacattccgaccgtgcgaagatgcgcgatcaggagcgacgacgacagaccgaggcaaagaagcatggcatctttgaagcctttggaggatcggacgaggagacgtctgattctagcgctccccattacgttcacacgagacgtacttcaacaacgcgccgtgaacgcgaatcgcgacctcgaccatcggactcctctcgtcgtcgtggacgccactacgacgaggatggcaatgtctccgatcacttgcaatccaagatcgatagtcagtactatactgcggaggactacatcgcaagcaaagcccggggttcaaagtccccacgacagtaccatggtcacgacccggcggaaccagagtctgcttcgcgacccgcgggacggtccacccgcacccgccgtcattcttcgtcgcgcgagaattcctacgagcatctggattcgccacgaaactacgatggcaagccacccaagatgcaacactccgcgacttccccggggatcaagacgtctctccgtcctgcgttcctcaacactcggtccgcaaccacctctggcttcacccgcgcaaagcgggacagtcgcgactccacactatacgaaatggcccacgagccactgccatcgcggggttccaaagtgcgcgatcgcaacgactcgggctattccagtcccactactcccgaaatgctcccgagaggcgtttcccccaagacctccacccgctacaagatcgttaaggaaccagaccacgtcgtcgtagaaccgaaatcatcaaagtaccgctcagcagcgagatcccccgaccgggatcgtgtaccccctacccgacaggtgcccaagcgaagcagtacctaccagaactacacttcggaaacctcgcctcggcttgagactcggtcttcgcggcctgcttctcgtccccatgcggacgtcgaatacatttctcgcccgaaagagaaggacatcaagtactcccggacatacagtcaagatgatgtcagttactcgccgagacgcgccccttactacgacgaggaatatcgtcctcctgccgtggggagacatcagtctgcctattaattcaaccatacgacccatgaaacatggacacatacgacaaatcacagctacaatatgctttacattttatttttaaacttttatctattatttcaatcttatcagcaagtcgcggcgtttccaattctccgcttttcgcatgtgtcggctgttccaccgaacatttgggagtacttagatttccattcgggctggtctggctgtccccgcgcagtcggagcaagagggcaggaccggggtatatctttgtcactgcccttggcgcattagggcgggcataggtggatggtgtgttgcatctgtcttgcctcaaaccctgcacttatggcgttatgaaattgtcttattgggttttacctacttctgactgcattctgcctgcattctgcttgctcccgttctcgtgttctttttccgcgatcttctcttctctatttttttatatatatacgttgtcgctcccgggcttcagatcccccgtggactaccaattggagaaatccaattcacgaattacgcttgttcacatgatatgatatgccataaccttgatcctttgttggtctctttgttttctctattcttgtcccgagtaagacggatatgttgggctgggctgggctgggctgggactggggccacagaaagtggcggggtaagcctcacaccggtttgtgcatggtgattggatcttctaagaatagactgttgatgtatttaggcatacctgttcgatcagtgcaaccttggaaatgttgataagactgcaactgccgacctgtgttatactattgggggctgttcagccttgttgggccgtcaaggctcaatacgaatttgattgtcacttccgcccccttaggaaccaactcaatacaacaagattttattctacccatccctggtcgtctaaagtcaagaagctgatacgtttttataggacatatattacatatattattatccagcacgacttggttgacctagatggccagatgcgacctggaatccaagagatgctgtctaaatctatcgatgaagatggccaatatcaatggtgagatgtaatgaagacaaagtctttctttctagatatctcgtcagtcaggcacatgactcacacgatttctactctcgtttgtttgaactatatgcttgttttatctctcaattctctggaaaccgatagactggatttgaggcatattgatgtatttacttctgttagactctttttccatggcataaataagattgttataacacactttttggaatagaagactagcttgctccttaaggccaccaggccaccgcaagtaattgagcttgttgtgtttcagacttgttctacgtttcatatattcacttatttagatttggtaatgatgatagaagcctcctaggagacaatcggatattacatcgagcctagctctatacgttaatctagggtgtaaggtgatgagtatctgacttggcgagtcttttgagtgtgatgtgcacgaattggccgactacttcctgccagcttgaccatggtcctccatggattaataacaggccatgctatcaagacttagtgatgtatccccatagtcttgtgagttcgcgactcatctcactacttttatgattcgtttcaatgagaaccatgatggactccgacgctcaagaggtttagggaggcagattggctatggcccggttactccagttttggtactactgagcggtttcctctcatacatgctccattatcaaatgctgtcgagtagtccatatgcgagcacatacgtattggtgcgacgagtttctatagcatactggttgcgcacggaccaactgcaccactgtgggttcacgggtatctgcagatcccccgcgatttgggaaaggaggcctggggttctatcgcctacaactagttgtacttgatgcactcagtaccatctaacttctctatttcagactctctttgctccgtcgtacaatgcgccagaatttccattctctccaaatggttattcacggtccctcggttgatctgagtgttggaatttcctcaggagtggcgccgactcgcataacattcgtagggatgcccatccttggaagtactacttcgtacaggaggccacataaactgccgacttgtcttcttgaggcggtactaacaaatggtatacttcattacatggtaatatcaatataaaatcacaatgcggaaatgaagataatcgaacctatatacaagaatgggagacacctagtagtggtatccatattaagagcaagtcgccagggttctaagccttccttggccgaatttacttgccgtgtctaggcgcatgcgcaccaaatgtccgtcttaaacaaggacgtagaatgcacacatctaaaaatcacacagggttagaactaaatatactggggtgttgcatattcagagtgaagaagtagggcttaccatagacagacccaatatcattgagaaccagaataccgcattctaggaaggaagtcagtgaaaatcgcagaatattaaagcaatcatataacagcttacattgaggattgtccggccacggaaaaagcgagacttttgaatcgcaacaataggcagctgaagcatcatagccaggaaaccgtatccccgaagcttcttggtaatgcagctcataactagctcgtggaatacagagctgaccaaaaatgtgataaacatagccacgggttgagagaagttagatcgggcaggccagtagacatggcggaagaggaagtgatggacagggacgttccactcgcgggaaaattccatcctatgtagaagccggttagtcatatcactcagactcttaggagcgtaatttcaacttaccagtcacaggaattccaccagtctgcatagaagtggcgatcggcgaaccgagtcagctctgcaaatgcacccagcacatattcgaagatgacgaggaatactagcaagaagataatcatgaaggggaagaggagcatgctgatggtttcagcaaggatgagagccttgtctgtgacgctagagacggcacggagttgggcgctggccactgacaacacggggacgatgaattcctcgcttgtcagggtgagcaggaagatgcagccaaatacagcagcggccttccagccaatttctgaccagcgtcgctcctttcggcggggatactctagctcatagcaaagagtcggacaaaagaggaagtccacataatttccaacgtgcagattctgcgggtatgagatgttgcctagcggggaggtcaactccgtggccaggtcttcacgcagtctctccaatggctctgcggactggtcttcgttgggcttcttcattgacggccgacgtcggtgtacctctggataatggatggcagcagggggctcaggtgactttaggcctggcttatcgagcgaggcaaggcggcgctctgtctcgctgagatgtccattatagaaagcgtatgagtgcagtttcatcagaatggtcagagtgtgcagcgtgaagaacacctgtgcagtccaggtccatttcatcatgaagggccagctgtttttctcatgtcagcgctctgagctccagcgcaaaaaccagctactaactcactttatccataaaaccaaccaaagtgcttcgcacaagctctgtaagagcatacctccgcgcgaccatcgcagccactgaggaccacttcgccacagttggtgcataggcaggacgagccctgagcttatcaccatggccgcatcgctgagccccatcccccacacattggccgtcaagagactccaaacgcgcacctgcagggggaatccggtatccttgatattgcgcaagatgctggtcccgaccatgatagccaagccaatccaaaagagagtgaagaaccctcggaagttgtgatagtcgctatcgggatcaaaatgtgacacacgaggcacatagtctattgtataaaacaggcgattgcgggcgcggacttgcttcctcgcggatgagatcgaatgcgctgacgggggagcatcttcggaaataggggttgagtggccactaatgtgacaaacagattagctatttagatccagtctggtgcaagttgagagcaaattaccttatatcctgaatcagcttgtccactggaagagggtgcgccacgtcggacttcccattcggctgtatcggcacggcgcgcggccgcagagctgcagactcatcctgtgagacggcgctagacatcctatatggacacaaatgcaggagcagggcgtttgcacatcgaaggcactgagatggaaacttaggaacagctatgattgtgggtcaggactcaggactgtttgagtttgtttggattcgaaaccaaaaacacgggccgctacgtcagactgcctttatatgagactatgtacgttattacatacatgtgagctaggcagaagtatttagatataaattgttgaattgttgacatgtttacatagaatctgtagtatctttactttgatacaagccagctatagtcttttctcttgggataagtatgcatttagatagctatactgtcctttagttatactccctactatgtacataactatgcatgtattgtaatttcaaaaatctgccacttatgtcatggttctgcctcaggtgtatattcaaaggcggtgtaactgattagtaccaaagagtcaggtgatccagggtaaccaagctagtccgtttacatactagtgctctatgccaagatgccaggtcgactgccatgaggaataataatacaacagtccagacctccagaccacggccttgatacttcttcatttcattggttttataagcgcggtgcttgcttcaccttcttgcgcctgactctgtcccttgtcgtccattgaatatctctcttcctcgccccgtcgggggtccctctcgccgccatgtcttcccgtaagtgctgcccgccgcccctcctctcccctgagatgcaggctgaccacccaattcaatatttctacagtcaagcaattcatccgtaatgtccgatcagcaaaaaccatcgccgatgaacgtgccgtcatccaaaaagaaagcgccgctattcgcgcctcgtttcgagaagagagtcatgactccagcatccggtaagcttcagcatctacctcaatcgagtactcgatcggcctctaacaattgataggaggaataatgtcgccaagctcttgtatctgtttactctcggagagcggactcacttcggccaaatcgagtgtctgaaactactcgcctcacaccgattcgctgacaagcggttggggtatctggggaccatgctgttgctagatgagaaccaagaagtgttgacacttgtgaccaattctttgaaaaagtaagtctccctgtagtacttgactgaccctgcgctaactaaatgcagtgaccttaaccactccaaccaatatatcgttggtctcgctctctgtaccctcggaaacattgcctcggttgaaatgtctcgtgatctgttccccgaagtcgaaagccttatgtcgaccgccaacccctatattcgacggaaagcagcgatctgtgccatgcggatatgtcgcaaggttccagacttgcacgagcacttcctcgagaaagctaagaacctgttgtcggaccggaaccatggcgttcttctctgtggactgacactagcgattgatctatgtgaagcggaagaagaggaagacgaggaaggaggaccagtcggcgtgatcgaaatgttccggccgctggctggaggactggttcgcgctttgaaggggctgactacttccgggtatgctcctgagcatgatgtgtccggtatcacagatcctttcctccaagtcaagatccttcgcttcttgcgtgtattgggtcggggagatgtggccaccagcgaattgatcaacgatattctggcccaggtggcctccaatacggattcctcgaagaacgttggcaactctattctatatgaggccgtgcttacgattctggatattgaagccgattctggtctgagagtgctaggcgtcaacatccttggcaaattcttggctaacaaggacaataacatccgttacgttgcgttgaacaccctgaataaggttgttgcaattgaaccaaatgcagtgcagagacatcgcaacacgatcttggaatgcctgcgtgatcctgatattagcattcgccggcgagcgctcgatctcagcttcatgttgatcaacgaagacaatgtgcgtgtgctagtgcgggaattgctggccttcctggaggtggccgacaacgaattcaagtccgtgatgaccacacagataggcatcgcggctgatcggttcgcacccaacaagcgctggcacatggacaccattttgcgggttcttaagctggctgggaattacgtcaaagaacagatcctgtcttcattcgtccgtctcattgcgactacccctgatctgcaaacctacgcggtacaaaagctctactcctcattgaaggaggacatctcacaagaaggtctcacgctggctgcgacatggaccattggtgaatatgccgatagcctactccagggtggtcagtacgaggaagaagaactggtcaaggaggttcgggagagtgatcttgtcgacctcttcaccaacattctcaacagcacctacgcctctcagattgctgtcgaatacatcattactgcagccatgaagcttactgtgcgcatgtcggatcccgctcaaattgaacgcattcgccgtttactttccagccggaccgcggacctaagtgtagaaattcaacagcgtgccgttgaatacaccaaccttttcggttacgatcaaatccgccgtggcgtgctcgagcgcatgcccgcgcctgagatccgcgaggaacaacgggtactaggtgctgcttccactactaagaaacgtcagagtaagcttctccgtgggaaatcgaccacaaaggtcgccaaacctgcagagcatgacctgctccttgacctggttggcggagacgctcctgtcacgagccctacctccaatggatcgaacaccgccgatctgctggcagacattcttggcggagactcgggcatgtcatctccctcgccggggcctgctggccaaaagaattccaacagcgccatcatggacctgtttggctccaacggtccttcgcctcaacccacacaacccgcatccgcctcgatggatctgctaggtgcaggaggcttgggtgcctctgcgccctcaccctccggctctcccgcgcctgtcactgcttcgacccctgcacacaccgcgctcaacaaggacggtctcgtccttaccttgcaggttcagcgaagcggtgccaacgcccagatcctggcccgcttccgcaacgatgccagcttcggccgattcactagcgtcggcttgcaggccgccgtgccaaagagccagcggttgcagctgagcgcaatcagcaaggctgatttagatgccggcgacgaaggcacacaacaaatgcgtgtgaccgctttgaacggggtatgtctagatctccttcctattctacattcttaagtctcgcactaaccgattatctccagggccttcctgccaaacttcgtctccgtcttcgtgtcacttctgctcgcgacggcggaaaccctgtcaccgaccaagtggactggtccgagccgtagatcaaatcggtggcagcgatgctaaaagtccatccgaacgaatgtttaattttcccatgaacagttaaatccacttctatacaccccggttatcgtgcaccttcttcgcttttgctatttatctagaattttgttttgccattgatttccttttctcctgtacttcgtttcactacttggagggagggaatgttcttattgtacatgcttcagatgaaagttttagcgtatgagaaagtgcagggtgtattcgcttcgagccgatatcctagcttactagtagtgtgttcctacatgtatgtacacatcagatactaatagatgttaaagtgcattgtgacacctataacgcagactaaatccaaaacatagaacgcaatggaatgaataggcgataaaagcaaggctctatgaccttcaaaagagaacccagatcaactgcagcctccgcatgagaagaaacaaaaatcaatatataatacccaggaaacaaacaatgaactccaccgcaggaaaccaaggaatgcaaagtcatatgatttatccaaaatccaaagcgtgagtccaatctataaggtagaaccggaatataccaagcaccagaatggtatataatatggagagcaggtctaagacaagtagccaagctaatcagatatgctcaatggggccttcgggaagtagcacctctccctctctccggtcaccgggcaaacaagccttgagcggaggacggacgatgtcattgaacatgaaagttccatagacaagaagcgcgaatccggcaacttggagccatttgaaggtctcccagccgagtccaagcgagacaatccagatgaagagtgtgcggcaggtgtcgattgtgctacgagaggtagcagacacagtgcgggtgacagacagaccgaagaagttgaagccactagaacgaacgttagaggggagggcggaaaaatggagttgagaagcaagatcaacacatacccgatactgatcatgataaacaagctggatatggcaacagcacggttattaagaacctcgtgcaatccctgcttgacatcaaagtagccatatcggccggcatcggtccgtccgacagcaagatacatgatcaccatgccaacgacagtaaccaaaaatccgaacacaccttcccaacccacaacatggatcggttccatggcgtaattctccaaaatccactcctccaacacaaattgtgtggctgtgaagatctgcgctgcggcaataagcagcacaccaatgatagcctggacagcctcgggggtccgagcaacgacacgcgcctgcataagaccatgcgagactgcattgctagcactcccatcctgagtgatatcgtggtctgaatctccactgaatagagctccggaaagacccacaatagccacacctagaacgacaatgaagagtgcactccactggtataagtggagcttgcggcgaaggaagaggacactgaacaggcctacaaatagaaccagggcaccccgggtcatctggtagatactggctgccacaaagagaagacccacgttcatgagggttgtgccggcgatatcgcagctagatggcgctgcaagaagtaggatcttccatccgcggagtgggatgcggctgtcatcttcgggtaggggcttggggtgtctgctatcgctgtcgagttcatcgactatgttgtcatcctcatgatcgatgccttcatcatcgccgtttatcgggtgatatccgccagttaggaggggtgaggggtcactggataggcgcggtgcgatgtattggcggtagaggaaggttaagccgacaactagccaacagcccatttcacccataaacattacggctctgcattaccgcctggtgtcagcattaatcgctagcgttgtaaggctgtatcatcggcacggggtggagcctacgtctgaatgactggctgctcgaacagctttcgctggctgggatctggggaatcgcagtttcgcacacattgcatatcctttttgagacgggccaatcaattagttcgtgtttctttgtagcttgaatcgaatcaaggacgcacctgatacttgttgagaatggtgttgcacaccccagtcacgagcatcatcgtgaccaggaggggaatgagggcatggttcgccatcttgtcccactaaaatagaactggttgatagaagttactccaagagttaggaagatggatgaagtgatcggagggtcagtgaggagacaaagcggaggtgagcttatctgagcttggtggctgatagcatttgtcacggtacccacaaggtactgtacccgccgacatgacttcatgtttggcttcatttggcacatacaatgtacgtatacatatgtagtacaacatgtccttgatattactctctagtgctacatagtatgtatagaatcctggttttccaaaaagaattatgaaattcaaaataaatgatccagttgagaacctctccaggttctttctccaaacgccatcgctgaggccaatggacaacacaaaaaagtccagaaatgattagaaccccaaaaggtcaatccctaaggatcacaagaaattaaccaagattcctgcgtggtagtgtacaaagcatcgctcctgagccatatatacgctagaaacgaattcgccgaaataaaatgtttcataaactcaagtccatcttcatgtaggacttagcactgtgtacatgctctcaattagacaagaaacatttcactttcttcaagtcatttggatgggaatgccttccctctcgtagcgcgcaacagcatcccagtcaacctcaagttggcccataggtccgatacccttgacctggatctcaggcgggatgcggatccactctgcggcccttgcaatggactcatcgtcccaaggttcataaaacttctccaggaaagcagcctcttcggcctcgtctgggggagtcagactagcaaaggcaacccagtcatcatccaccggagtagcttcattgatatcgaagtcctcgagcgagtcatagccaaggtgaggcagatccttgctcgcgaggttcgaaaaggtatcatggattgtatcaagtgaggtggggcactccgcccagggatcctttgtgtcgctatcatctagtttgataacatccttcttttcatctttgccagcaggctttgttcccttgacagtggacaactgcggagtgagcagctgagttgatgctgcagcaggagacgcagtcttggctccgaattggctagtgatcctagccatgggcgtgttgttggcaatgagaggggtagccatactttgttttaccggagaagctgctgcactaagcttggtggagggcggcactgatccgagcgtggctatctgctgggcttccgggctgtcgtcggggttcaacccaagacccatcgaaatactttcatggtaatatttgagataatcctcgatcatctcttcttcctcgggttgatggctttcttcgatgtgcttatccaagacggcttgcgtagggaatccttgatagtgatgttggcattcaaccacactgcatttgaaagcacctgccatggctgcagcattagatgtggcgtccgccaccgctttgttgtattttgccgctgcgccaggggctgcagttgcttgaatcggggacgatgccacgccatgagactgcttccgctttttggggggaggcagtttaaggttctcgggtgcaagtccacctggggcatactgagggacgcccctaggagatggggctgcaaaaggtgcagctggggcatttgcaacagactgggtagaggcgcgccgggctcgctgcagggcttcttcctgtgcctgcaactgctgcaggttggtcgcgttcagtgctggcatgttgccttgcattgcctgggcgttggaggtaggaggttgggaggcgttaggacgctgaccctgttgttgcatgcgagaaatcatcactgcgaacaactttcgcataaaaaggacagcaccagtgaggtaatcgggagtcactgtaaaatggtcatttacaacccaatcctgcgagggcttgaactgcctcatcaattggatacgctaagtaaaatcagattagtaaacaaacgatcatgatatcaagggggagcttaccatagcgaggaggttcttaacattcttctcctggccatgcatctttgcaaaccattgtacaagggcatctaagcggccgagaacatccaaggcttcacgcagttgtttagtcatggcggccttctgttcgggcgagacgggtataggtttcgcgggtggagcgttcttggcgatgtcattataaacctccataacttgggccggtaggttcctgttccatgcctcgtcggcggcagctctgctgagtacctggccccggctttgagactgttgcctccgcatgtgtgcctcaacctgagctcgctgttgaggagtcatttgtgcaagatgttcctgtgtgaaagggagacctggccgttggggggtcgtgcctggagcgcctggaactgccacaggctggctcatctggggcgtagctgtagctcgagcttctgccggatcatctgcgttgggtctcttctttgaggcttgcttcccggtagcacccttggcacctttagccgcggctgcagtttgagtctttgcgttcgccgcttgaggggtcgtttgcggcggttgaggatgctgtggcttgatttgggggacaggctgtactgcagggaccggaggttgagtgaccgccggttgatttagctgacctgggtgcgcgtttccatcaagttgcattgctctgttctgtgcagcctgcatcatctgcttttggcggtttcggtacagaatctcccgaatctgctcatcagtaaaggttgacgcctggggtccaagcttttgacgagccattgaaatgtcttgcgcggagattggccgcatggctgccatattcatagcagcggcttgttgaccaggagggaagcctggcgcattagtaaacggagccggagtgccttggaatggagttggcgctggaccctggccattcctcacttgattcgcagaagctgagatcatttggccaagatgaagtttctggagcatcatgagacgcgggaggtcgttggggcttgcaatttgagggttcgaatttgcccattgcttgagttggccccatgatttaacattgttagggacttgcatcgaagtgccattcatgttcagaatagacggtgggaaagatatgcggtccatttgcttggcctgctcaggggtcatctccacgccattgttttgctgccgcagcagttggagcttataaacttcgttttggcgttgttgacgttgcagctgagtcatttgctggccttgaggtattcccgagttcatatcctgcggggcacccatcgagcctctcatcatggcgttgcccatctggttattcatcattgcttgggcttggcccggttgatgttgcggttgctggccggggttggctcgagccatattattgagagcggcacgacgttgctgcatgataatagcccgagcctgttcaggaggcatacgagcgagttgttcctggatgtggggcggaatattgggaggcatttggacctgaccttgcatcgcagcctgtccagcaacgccagccgggtgctggcccatgtttgcaggtcgggacggtggtcgggcttgcgggggcacctgtaccggagacatctgacccggggccatgggttgattcagcataggcatgacggggctttgtccattcagttgtggctgtgattggggggtcacttggccaccatgacccgacatcgccatctgcgccttctgcgccgcttgtgcgcgcgcttgagcctgagactgtgcctggaactgcattcgatcctggggagcattgggcccaccctgcatatgctgttgctgggcaaggaactgagcctgggcgtttggattattggcgttcattgtcggctggccattctggcccatctgctgtgggaacatgttgttgttattattcgggaatggggcctggttcatttgagaagagcttgcaggaacgactagctgaccagcctcctgtgagcgcaggccatctgcttgctgtccttggatgttttccacattgccaatgaagttcgggggttccatcgtctgaccgggatttcccggaaatgcggaattgcgttgaaggtttaacatgttttgaagcatctgtcgctggtgttgagaattcatcatgggatctcccatcatgttaccattcgcatccaccccgccatttggcccacgtccccccatttctaaacgagcgcgacgatggcgtctgatctggttgagagcctgagagcggaagaaataggtcattggctcaagattcttccgtgccagatattgccgctgctcgggtgtcatgtttgataggttcattttgatcttctccatatcttccgggctagttttattcaacatctcgtttgctagtcgagagacatggtcaaggtcttgggctgaaagggtgctgaggtcgtcgaccatgggaattccattgccagggcgctgttggggtcgctgctgctgttgttgttgctgctgctgctgttgttgctgctgctggtggagcatcgcctgcgactgctgttgctgtcgctgttgctgcattgctgcctgctggttctgcccattcatgcccattgccatctgctgttggccagaaaccggggatgcctgcatctgattcatgtgctgcggaaaagcgcctggaatttgattctgaccagcgcccgtctgggacatcattccactttggtaagcgaccgcagcctgtctctctcgtgtgttccttatgtgaagaagcttttccgtgcattccttctcatattcgatcttctcgttggctttggtgaatgcttttaattcgaaactcatggccgcctgggccgcttggtggagatcgatgcgaggttggatcaaacggagggaggtgatcctaattcatgcaacggttaggccagataagagtgaacgcgcgaagccagttttcacaggcagaaggtgcaacttacatttgataaacattggtcgcccgggtcttgattagaacctctgccttccatcctccgtacggtccctgattttgcaacatttgcgcaacataggtcatcatagcttgcacactgtcgttctttgggacctgcatgtttggattcattctcatcgcagtattcggggctggccggccaggccccgcgcccgggttggggaactctccgggattcatagcggacaccccatcaatggtggacgggcaatccgcgaagaggttccgtgaaggttagcattcgctggagtaccatgcgcaactgtgacgatatcgcaaggttagtgagaagacgcaagtacggtgttcaacacgggtcgctgatcagcgggagaaaaaaaaggtaggtgctggtgtggaaccgtgattcgagtcgatcagggagggtggggatgggtggaaaatgaacgaaacggaggacaggagggactggagggaaccaacaccaacgtaatgaggagagcaaggcttccgggcaccagcgtcagatggattcaattcgctggccagcacctgattgtggcttggagcgaatgatagcagtttgtaggggagatgggatccgtgacagggatcatacagctttcaagtcgcaccgggcctcagttgctgtcctcactacacaatggcaagaagattcggggggagagaaagaacacaagtacttaccgagaatcagaatgccactaggacaaagagatgagtgcacagatcttaaagctagagggggggcaaagagtgaagtggcggtcgagtgaaggatattattctggtatggttattcagcgtattattcgcaaatgaatgagaagtgacgagaaggaaataaaggaaggactatgttttattcggccatcatcccattgagggtttgggcttacaacataagatgaagaataatagaactgactggggcgtgtatcaataggccggtatcttattcgtattgggcggagagtcacaaggctggctcggaggtacttgcagtttgcctgggtgtgcactgttgacccaggtatcccgaaaatacagtgtggttttttacctgtactgcaaatacatcactgccaatcctgatgatccaggccgttaagtacctgaaggctcaaaacaagtcgtcatcatggtgtggatcttaaataatgcccgatattgtacccatcatagataattacggggtatatgagggtgcataaaataaccccgtggatgtatatgctgtagacgaaaatgagaattcctctttattcaattaattattcacaaagctctttgcccaaggaaaataactagggaacagtttccatcaggatcgacaagggcgttctggccctgacctgatccggacgaaccaattggtcaaaatccagaaacaacaggaggctgtggctgggtaccaggtactccactatacacttgagcacacgaccaaagcaaagtcttcagtactacccggggacggtgacactgttagtcagagcttaagtcagccactctcctggccccgaaacgtcgaccccccatggcctgttctatatatacacttctgcctttcaccaacttacattcagtcgcctctttcatctgcgccctagatatctcgccatgaaaaacgactgaaacttgcttgtttttctcttatcggctttcgctgtttcttcagcatgtttcccttatctgtgtcgcccatctcggtgggttcgaacgtctttttcgcatttgccctcttcctcatctccgcacttgtgttacttctcctgcgacggtttctcaccctccgggccacccccgcgtatttaattgtccctatattcctagctctagctctgccagctagtgttgtgcttttggtccccatcgatttagcatccagttcgcgggatggatccggtcccaaagcaatctggctaccggaacgaatggttttggtctgctggcgcattgcctactggttaatctttgttctcacctggtaagtgtactgcgctcttcataaccaatggctgtcactcattcttatctctcttccagggttatcctcccattactcggtgaatatgtcgactcgggctaccgtgaaccgaaaggccggcttatgtactctctccgatcgaacgccaaataccagatgattgttctgggatgtgctctggtagggttgatctacgtttcaatctcgaatggcttcgaattcacatccatcaaaggtctcgtcatggcattggcatatgtgtggggtctcgtccttgccatttacctcatgggtcatgggcttgtttcgatcccgcgcaatctgctccgaaactccaatgtaagcggtcggctacgcagactccaggcccatgcgcccaaggtgcacgatcgcctgatggactcggtcaatgagttagcgaatctcaatggccaggtttcgcaactacaacgccgtaagacgggaaccgctcgtgacttccaggaatggattgaagagcttcgggaaggccacggccaatccgacgtgcgcgccccgatcctcgagtcacccgatacatccgcaacgataccttctgtcatcacggaacgctatctggccgaccttacacggcggcttcagcgtgctcggcatatgaagacccgatttgtagacgagtgggatcggctagtccaattatcagccgatctgcaagccatcattaattctgcagcttcaaagaagctggaatttgcaccggctccacgtcggtcatcctgcatccctcgtgtgaaattcctcaccccgtatatgcggtaccagctgtattccaacgtcattccctcggttcggttggccttaggtgcattcttcgcagtggcatcagtctgcattgtttggtcggaaatgatcaagtctttggcgccccatctctctgccgtgagtttgaccgtggtgcctcactggaaggacaatccagttggctttggtggtcaactcactgcctctgcctggctattgtacatgtgttcggcggctctcgttggtgtcagtgatgtcaaggtatggggaaaccgcgcgcttgtccgtcgtaatacatatggtgagagtgcctgctggtacgccggtcttgtggctcggttgacagtaccaattgcgtacaacttcttgaccttcttgccaaaagagtttaggcgaacgactactttctaccaattccttggtaaactcatcaacctgacccccctcgggaaaggctttgatttcatcttcccaatcttcattctcctgcctatctgcgcaacaatgttcaacctgtacgggcgtatcaaaaacatcttcgggtgcggccttgcagaggacgatgatatccacgatgtcgaaaacaaccctgccgggtatggcatgggtggctggcgtgagggtcgcgacctcattgaacgggaattgaatggcttcggttctctggcggtatcctcccgtggtggtcgctcaacgtgggcgtcggatcgtgatgatgaaggttcccctgggtcatccagactgcggctcccggttgcagagggctcccaacctgcccagaggacagttgttgcgcctactattgtagaaggcgaggatgaggaagacgagggcttcttccagtcctttgcgcatcgtgtcaaaaacacatttgatactaccagcactcctcggtggttccagggtgagccattccgacttccgcgctggatgtcgggtgataacaatcccacagaagaagcttcggcactattcggaggtcgggacgtgcctggtcgtctgcgcctaggttgattacattccggtccttgggtctcgtcaactgctggacagtgtaatataccgtttacttgtacatagctcaattcgtttgtcttgcttggatacaccagttccaattgaacatttttatatacgaaaaaattatccatgattaaagaaggggtattgatgctaccacccgccccccttggataataccatttccctctgcctgaaatttcagtagcgccttcctcatttagctaagtacctctagtttatatggtaaaaagacatacattttaattagaaaagaatcgctgatttctatatgattcaatcccttgattaatgaggtatttgatagagcagttaacgataaagcagtatataaagcagttgatataagatataataggagtgacttgattttattagggatatatatataaactgtaggtacctgctgtctatgcggtatatacagtaaattgggaggcggtaaggagagcggtaggcagaagcaagtgtcgaagcaggtacttagctaaatgaggaaggcgctactgagatttcaggcagagggaaatggtattatccaaggggggcgggtggtaactagcatctataccctttatttagtgggtaaataaaattggtttaaaaaaaaatgccctcgtccaggatcgaactggagaccttcggatttcaatcttgttaccaagaatgtcacattgaaagtatatgagaccaacgtcataaccaaactagaccacgaaggctgtcggcgagttgtctgatagaccactggagccgattatggactgttcccaatttgatagcattatactctgaacataactaataagtgagctacgcttgggcttcaagtatataatctatcccttcgatttggtcgatttttgttgaatatctaataaataaagtatgcccgttgaatctcttcatgatacaaaaataaataccaagttgtatatagtgtaccagctacccgtaagcgaccactcggggtggtggcgcatacgtgttacccgactatctgctgtttgcatgtttgctagatatattgtttgctacacagtaaacgatatgttcgaggcttgcaatatttgcaaaaagtcggctatatcaacaggctgcttcccactttgcaacttgcttcttctctcttcatcttcgttatttcgtcgaatgtattgaacgtactcttactgcttgatcgacctggcacctcataaactactagtattctcggttaacctcacctaactagttagttattctgtatagtttacctcgctccgcttagcaaaattaagctggcattcggatgtccacatatagatatggtgggactacaatgtagtggtgcgatgtaagagggagagagttgtctattcctaaggggcagaatgcccgactatctagttatggagggttggtgcctgccgcaccgggctgatggtcaggtgaccaccatgtccaacaatatatctctctcagacattagaaacatccgtatgacattttcgagtctttaattgcctgcaacaagcatggtcggccacctgtgtgaccatcttacatatttctagtacctcatgtccctttcccctttctccttcctcctttcctgatactcccccaaaatataccataaacagttagttgaggttttaaatcagtacaccactgttcagggccctcgagcaaaaccaattactactgtttccgatcaaattatgatcaagttcggaatacctaggatctcaaatttgcggccgaccacattgtgccctgggtcagcgacagactcaagctgtcagtttctcaaggcctctacctggaatatctcccactacctgtgatagatgcagttatgtcaaagtccaagtccactaagagaatatagaatttgtcaaattcaacttgaattcttcaactatccagttatctcatattccacggtgcatctactctcctcgcaagtatactaccctaatacagttcttcccctcacaatggacgggctaaccttccaaggcaggtaggtattgtatatacctgggccctcgggtattagtgtattatcacatgcacctgagtaatattacttgtcctagagtactacatgtaggtttcaatcttttaaggctttttctccgagtcatgctttatcccaaaatttggaattgagccctggagttttgtttagctgaattaattgtactattacctgtcgttgccttgattgactgctggctatctcattgatggattattcacccacgagccttggagcagcgcgaaagtctttgtggagtcgcggttggttgcgctcgattcattgacttgcaaaacaacacattggacctacttgcgtttgatatatatgttgcttgtcatgagaacggcgtagcggtgccgcctcgtcttgtttatgtatgtacatattcatctcgtacaatacggcaaagctcatatcaatagtcccaccacaatgcgggggtccgttctgcggaataaagaaacatcagtatgtaaataattactctctaaggacttatgtcgaccaaaacttttaccgctttaggacgacatctagagttgctgattcttgccatcctccgggacccttgcagcccgtgaatccttctccctgcaattgcggcaaagtggtaataacaggagcttatggaccttgaatttcttggtgccatcttttccctctcttgttccacatggacatgtaatctcgtgacctagttttctcagaatattgacttctgcttgtgtttcctgtaggcgttgcaattgcgggtcacgaccacctggaaccctgtagcatggccggcaaatgttactcccctcagacctatgccaggtctttgagacacctggaaagccctccacagcatgacacttgacacaaacatacggcggccttttctgaagctttgcaagctcgtctggtgttggagcaagcttctcagggccgtttcgatcgttgccatatctgaccaggtaggcataacatccgccgcaccgtaagctaacctctttccagtacaagagtggcttgccatatttaaggcggttgatattctcggtcacaggacaattgccattttggcatcttccgacgttctgcacgagaaagtccttgtcctcttgtcgtttcttggcgccaagggatcgcagttcaccggtggcatattttgaagcccggcaagccctacacaagatcatctggtattcatctgaccatgtgtaatccggcgcatttgggttctgtggagtatgacaatgtccgcaatgtacttggactccagccttcttatcctcgagccgcttttgctgagcctgcgcgttggccacatactctagcttgggcaaattgtgtttggaatctcggtcgcggtaaccgtagcaataggagcagatgaaaccagcaaggggatcatcctcccgcagcaggaaacgccgagtcatcgtgattgggtgactttccatatgactcaaaacctgtcggcgaagaaccgtgttcttacaaggaaaattgctgcactccgatgcccgctgaagatttgttccagggattccctgtttgagggaccagcatgagtttaatcctttccatcccggagaatacaggactggatctcgaatcacctcagctagctcgaaggtggacagcgtgctacctgcgtaaacacgtccatgccactgaaaagtgtcgaagataatcataaacagcccttctgcaagctgagcattggcagcatcaacacctgagccgaaaacagcgagtagcacaaacctgctcagagccccaggaagacgcgctctatcatagtgtagatttcgaacgccactcctgatactcaattcatggccggttcggcgtactcccccatgaccagtgaatcccacataaccatcacatccaaactcttgatctggaaaatcgccaggaacaaggtggcagtaattcaccatgcgttcatcagcgtaacgcaacaaaggaagagaaagtaggtcttcaaccatccacttgtccttctcgaatagtgctttcacctctggcagtgtaaccgagaggacattagtcataagtgtacccacatcgtatcgtcgcagaccgagaaaaaaagtccaggtgataggcttttctttcttgaagcaggaaaaggacattctctgagcccagtccagcagaggctcaatgacggatctcagggcacgctcaaacttgtccccagaaggtaaaccgcacgggacacccatgactagatgagcagacaacgcttcatcttggccatgatcagacactggagccgtgccaatgtcagccagaacacaagcactatgttcctcagaccaatctgcatcaggatcctgcaatcggtcatattcgtcctcaatatcagaaagatcaaatactgtgacatagttagcgagaacaaacagcgtacttaataatagggtgtatctcttaccatatcgatcttcgacctgatcctcgaccacagaccatggattctcgtgatgtggcactgcatcaacgcgctttatattgcccgcgatcaatgggctacaacgttgatgatttttttgagcgttgtcagaagcgtgggtggtatgattagctgggtgatatctctttggggcccgaggtatgtcttccctattgccgtccccgtgattcttcctcttattgctgggcggctccattgcgtccggcaatcattcaattcaaacacagaaaagatcttatggggtatatattggcccagtgagatagaccttcagatattggtgaagtagaaaagcaagagtgtactatactagtgtccaaatatgaatggatggggcaaccttccaacaatggaagtacctcttccaaaccgtcacattaccaaacaagattaccatttcgttcttatctggctatgtacattgtatactagtagatataccttttggacttgtgatgatatgattgtatattatctatgaacctatgacctggaggaacccaacagctccgccggcctcggcacattttacttacatatagagagtttgcataactacgactacagacgattaaagtatattccaaataggacatattattataattcttatatcataagacaaccccagtgctaattgtcaaatattttagaaattcgatcattgtttacaagtgtcttactggctgctttcagttctggtatatagtactattgtggggtgcaaatttcacaatcggctcaagtggtctatcagacaactcgccgacagccttcgtggtctagtttggtcatgacgttggtctcatatactttcaatgtgacattcttggtaacaagattgaaatccgaaggtctccagttcgatcctggacgagggcattttttttgcctttcctatttagagacgcgggtcatatctatggatcagaccaattatttcgggtgtactccgttgtagggttacttgccaagaaccgggtaattgggctaagcgcccaagcgacgattagattatacttagttacccggttcttgctaagtaaccctaccccccccccccctggtnnnnnnnnnnnnnnnnnnnnnnnnnnnnnnnnnnnnnnnnnnnnnnnnnnnnnnnnnnnnnnnnnnnnnnnnnnnnnnnnnnnnnnnnnnnnnnnnnnnnnnnnnnnnnnnnnnnnnnnnnnnnnnnnnnnnnnnnnnnnnnnnnnnnnnnnnnnnnnnnnnnnnnnnnnnnnnnnnnnnnnnnnnnnnnnnnnnnnnnnnnnnnnnnnnnnnnnnnnnnnnnnnnnnnnnnnnnnnnnnnnnnnnnnnnnnnnnnnnnnnnnnnnnnnnnnnnnnnnnnnnnnnnnnnnnnnnnnnnnnnnnnnnnnnnnnnnnnnnnnnnnnnnnnnnnnnnnnnnnnnnnnnnnnnnnnnnnnnnnnnnnnnnnnnnnnnnnnnnnnnnnnnnnnnnnnnnnnnnnnnnnnnnnnnnnnnnnnnnnnnnnnnnnnnnnnnnnnnnnnnnnnnnnnnnnnnnnnnnnnnnnnnnnnnnnnnnnnnnnnnnnnnnnnnnnnnnnnnnnnnnnnnnnnnnnnnnnnnnnnnnnnnnnnnnnnnnnnnnnnnnnnnnnnnnnnnnnnnnnnnnnnnnnnnnnnnnnnnnnnnnnnnnnnnnnnnnnnnnnnnnnnnnnnnnnnnnnnnnnnnnnnnnnnnnnnnnnnnnnnnnnnnnnnnnnnnnnnnnnnnnnnnnnnnnnnnnnnnnnnnnnnnnnnnnnnnnnnnnnnnnnnnnnnnnnnnnnnnnnnnnnnnnnnnnnnnnnnnnnnnnnnnnnnnnnnnnnnnnnnnnnnnnnnnnnnnnnnnnnnnnnnnnnnnnnnnnnnnnnnnnnnnnnnnnnnnnnnnnnnnnnnnnnnnnnnnnnnnnnnnnnnnnnnnnnnnnnnnnnnnnnnnnnnnnnnnnnnnnnnnnnnnnnnnnnnnnnnnnnnnnnnnnnnnnnnnnnnnnnnnnnnnnnnnnnnnnnnnnnnnnnnnnnnnnnnnnnnnnnnnnnnnnnnnnnnnnnnnnnnnnnnnnnnnnnnnnnnnnnnnnnnnnnnnnnnnnnnnnnnnnnnnnnnnnnnnnnnnnnnnnnnnnnnnnnnnnnnnnnnnnnnnnnnnnnnnnnnnnnnnnnnnnnnnnnnnnnnnnnnnnnnnnnnnnnnnnnnnnnnnnnnnnnnnnnnnnnnnnnnnnnnnnnnnnnnnnnnnnnnnnnnnnnnnnnnnnnnnnnnnnnnnnnnnnnnnnnnnnnnnnnnnnnnnnnnnnnnnnnnnnnnnnnnnnnnnnnnnnnnnnnnnnnnnnnnnnnnnnnnnnnnnnnnnnnnnnnnnnnnnnnnnnnnnnnnnnnnnnnnnnnnnnnnnnnnnnnnnnnnnnnnnnnnnnnnnnnnnnnnnnnnnnnnnnnnnnnnnnnnnnnnnnnnnnnnnnnnnnnnnnnnnnnnnnnnnnnnnnnnnnnnnnnnnnnnnnnnnnnnnnnnngcgatcgaaacggccctgagaagcttgctccaacaccagacgagcttgcaaagcttcagaaaaggccgccgtatgtttgtgtcaagtgtcatgctgtggagggctttccaggtgtctcaaagacctggcataggtctgaggggagtaacatttgccggccatgctacagggttccaggtggtcgtgacccgcaattgcaacgcctacaggaaacacaagcagaagtcaatattctgagaaaactaggtcacgagattacatgtccatgtggaacaagagagggaaaagatggcaccaagaaattcaaggtccataagctcctgttattaccactttgccgcaattgcagggagaaggattcacgggctgcaagggtcccggaggatggcaagaatcagcaactctagatgtcgtcctaaagcggtaaaagttttggtcgacataagtccttagagagtaattatttacatactgatgtttctttattccgcagaacggacccccgcattgtggtgggactattgatatgagctttgccgtattgtacgagatgaatatgtacatacataaacaagacgaggcggcaccgctacgccgttctcatgacaagcaacatatatatcaaacgcaagtaggtccaatgtgttgttttgcaagtcaatgaatcgagcgcaaccaaccgcgactccacaaagactttcgcgctgctccaaggctcgtgggtgaataatccatcaatgagatagccagcagtcaatcaaggcaacgacaggtaatagtacaattaattcagctaaacaaaactccagggctcaattccaaattttgggataaagcatgactcggagaaaaagccttaaaagattgaaacctacatgtagtactctaggacaagtaatattactcaggtgcatgtgataatacactaatacccgagggcccaggtatatacaatacctacctgccttggaaggttagcccgtccattgtgaggggaagaactgtattagggtagtatacttgcgaggagagtagatgcaccgtggaatatgagataactggatagttgaagaattcaagttgaatttgacaaattctatattctcttagtggacttggactttgacataactgcatctatcacaggtagtgggagatattccaggtagaggccttgagaaactgacagcttgagtctgtcgctgacccagggcacaatgtggtcggccgcaaatttgagatcctaggtattccgaacttgatcataatttgatcggaaacagtagtaattggttttgctcgagggccctgaacagtggtgtactgatttaaaacctcaactaactgtttatggtatattttgggggagtatcaggaaaggaggaaggagaaaggggaaagggacatgaggtactagaaatatgtaagatggtcacacaggtggccgaccatgcttgttgcaggcaattaaagactcgaaaatgtcatacggatgtttctaatgtctgagagagatatattgttggacatggtggtcacctgaccatcagcccggtgcggcaggcaccaaccctccataactagatagtcgggcattctgccccttaggaatagacaactctctccctcttacatcgcaccactacattgtagtcccaccatatctatatgtggacatccgaatgccagcttaattttgctaagcggagcgaggtaaactatacagaataactaactagttaggtgaggttaaccgagaatactagtagtttatgaggtgccaggtcgatcaagcagtaagagtacgttcaatacattcgacgaaataacgaagatgaagagagaagaagcaagttgcaaagtgggaagcagcctgttgatatagccgactttttgcaaatattgcaagcctcgaacatatcgtttactgtgtagcaaacaatatatctagcaaacatgcaaacagcagatagtcgggtaacacgtatgcgccaccaccccgagtggtcgcttacgggtagctggtacactatatacaacttggtatttatttttgtatcatgaagagattcaacgggcatactttatttattagatattcaacaaaaatcgaccaaatcgaagggatagattatatacttgaagcccaagcgtagctcacttattagttatgttcagagtataatgctatcaaattgggaacagtccataatcggctccagtggtctatcagacaactcgccgacagccttcgtggtctagtttggttatgacgttggtctcatatactttcaatgtgacattcttggtaacaagattgaaatccgaaggtctccagttcgatcctggacgagggcattttttttttttcccacatcctaaccgagatggaattcctctaatgcctctcttctatactgtacaacccttggatttgtcgatttttagtatgtttgctagatgctaggcagttagtgatactcgggacctactatatattaaattgagggttgggagtgctactgtttaaatattgaattcttttgcatctgtaaaaatacttaattaaatacaacgctatttgtgagctaaaggaagcctgggtgatttttctacagcgtatgggatacacctatgaaaggtgcttcaaagtatatgtatacatctcgaccacctctcaatagcggtccgtatttcgtgcacatggcgcgactctagcatagggacctgttcctaggtgtacatagttgttaaacttcttagtctaacagctcttcaatctcacctacattcatcatacacctcggcatctctgtagacctctatcctcatggtacctactataccagcccattgatataaccttggttgtatccagcatgtatctcaagtcttttctctgtctctagacaccagcctacgcttcattccccacttgttgttgcatccataggcggatagtttaggataataccattcatactgagtggatatcttccacctggctctgcggactactaaaaattgagttgcttcttcactgaaatggcttgttgtaatagacaagtgtgttttcttctcgccactcttcgtagcctgtatcactatcttcccaatcaactcggaacatgtatagtcgtcaatatctaccaatccggtgcttaacaagcagcctcgagtcaaatacataggtattggccgtaaccagctacatgggtgaaattagaagactgtacgatgggtcaggccgcgacaagcagccgtgtggcaagaccaatggcccggttatcaaaaatatatacatttctcaaacgtggtttacactggcatattcttgatttattgattgaagaacatcgtaacgaacatatgcaggtggtattcagaatgcaccccggctgatgcagctggactcaaatggatggactcacatggtactgtcgaatatctacacttcaaatgggcgcctttgtcaacctttacatagtcccctaacttaacttcttccacagttgaccatcttctcgcatttcaccatgcacccagacgtctttgtagacctgttggtatgtcagatcctggttcttgggtatttgatacgccatatatttgttactgtagaccagagagagatagtgccggcttttatagtagctgccccattattcttcttcatcttcttcttcatcttcttcttcatcttcttcttcatcttcatcttcatcttcatcttcttcttctactctctctctctctctttatgtcaaatacgtagcttgtcatagcagggtgtcttggagacttgatcaaggacaacttaggtggttatcaggtgagtctaaatgacatatctactagtatataatgtaggtatagatgacatggtaaccattgtatggtactgtaacggttccggggaagcactttgaccttaaaaatgttgccctatctatatttggacactagtatacacttgctttcctacttcctaattcccgaaggtctgtctcactgggttagtatatacctaataagttaatttctgggtttgaattgaattgattaccgggcgtaatacggggagtgcaatggggaagacatatattgagcccccaggagatatcacccagctaatcacactccccacgcttttgacgatgtagacgactttttaatataaccgcagattttacctcgcttgttctctttctatatatagaaagatcttctatacgggttatgcttctaattgccttcgcagtctatacacatatggatatgatccctgttattcttcattattcttttggttttaatactacgagtagaacgatataccacctatgcagataaataggatcattgaagtgctacatcctcttcggggggagaagccagccagctactcttgttacttgtattacttgtcgtagacagaaagatcggtctgaacattatactcatttctcgctaacttctttattttgcagctaattcttcttgtcttctgggcacagtaccggtaatttcgctactccccgtgaaccagtaatagtaagtggcacccagtaaacgccatggatccaagccaattcttgtcggctccttgcaaggaggagtgccaggaggtgcttgttggagtttataagcgaaagcaagttccttgcgaattgtatccagatccgctgtgggattcacatttccacgtagtcacatagtgtaattgctgttttcaaacgaatgtcgatcccagtccttggggatggagctggcgattggggacctattgccttggttggttctggcataggttttgctcccctttctagttcttttcgacttatcttgctagtctgttagatgttgatttggggggcattcatttactcagtgctctatatctccacggataaacaaagccctttcgttaatccctgaagtatctgtatacctgcatgctcgtgtcactccatcactattgggtcctaaggatcgaacattctttggggtttgaattctttcttctatttcccctaccccggctctgccataatagctagggctgacgtctgttggtggttatcactgtttcgattcgtgatagggaaataacaagaaacggaaaatgaagagagggacatggccacataaatggccggccatgcttgttacgaacaaaaagagactcgaatgtgtaaatataggtgtttctaatgtccgatatatatacatgcggacatccgaatgccagccacaatacacactgtataaaattttatttttattttttttgatcatgaggaactttagggaaaatttatttgttaaatattcaaccaaaattggctacatttggagggatagaatttcggttatttacttgaagcctggctttagtccatagtaccattaagtcgtgtaacttccataatcggctcaagtggtctatcagacaactcgccgacagccttcgtggtctagtttggttatgacgttggtctcatatactttcaatgtgacattcttggtaacaagattgaaatccgaaggtctccagttcgatcctggacgagggcattttttttgcctttcctatttagagacgcgggtcatatctatggatcagaccaattatttcgggtgtactccgttgtagggttacttgccaagaaccgggtaattgggctaagcgcccaagcgacgattagattatacttagttacccggttcttgctaagtaaccctaccccccccccccctggtnnnnnnnnnnnnnnnnnnnnnnnnnnnnnnnnnnnnnnnnnnnnnnnnnnnnnnnnnnnnnnnnnnnnnnnnnnnnnnnnnnnnnnnnnnnnnnnnnnnnnnnnnnnnnnnnnnnnnnnnnnnnnnnnnnnnnnnnnnnnnagttcccgggttcttgctaagtaaccctacccccattcgggtgtagccatggtatccctacacccgaatgggggtagggcaagaaccgggtaccgagaaaatcataacatacggcatgtcttcgttctcgaccctaagggcgatctagccgaattgaaacgagcagaaattgagcataattgtttaggaattcttttcaagacacattagatattgcacgtaaatgtatatgtaactagctcattcctcttcgtaatccatggagggttactcatcgaatttggtttacatcaatacagttgactatacaactagctatatgttaatatctgatgtagccgacattttgatacataccgaaagacaggggctgtatgaccccgcgtttttgcacatacatacgccgatcgaggtcagattgggttactcaaggccgagaaagagcctccatatcacgactaatgaggagctgcatgtaccttgataagatctccaaaaaaatacagccgggaagtatataaccatattcaggatagggacatatggatgtaaccggtctgccttgtgggagcatcgccacactgccaggcagcctcaaggtaatacaaggcacccatcaatttagttaccccaaccattgcaaatgtcgccatgattccgacgtcaaaagaattgacctgaattcagacgatccactaggcagacacaaccttgttgggagtatcactaaccaattgctatggcaaaaaactactctccgccttatctgcccattccagacgacttgggggcatgacttcaccgtccacgctctcccctccacagagatccatgactttactgcccccaatcctcgctcagtccaccttgggcgagaagtgcgcagtatacatagaccaggtcaccgataccctccccgttcatctacattccctccgccttcaactggaccccgttctcatctacctgtccaacacgccactcggccctcttgcgaaaaagctgccatttgccccagacgaccagccgatcgctctcctcgcagctgttgttatttgcatattcaccatcgtgatgagttggcgcaaccccttaaaaatgctccgccgctcgccgagctacgctcccgcatcatccaacccgcaggttagcgatgaggatttcagctacatcacaccttcagatatggcgggctcgcctggagatgaagccgacccggatgttatttcactccgtcaccgcggcactatctacccattgcgcttccgcgcatacgccattgtcgacggtctcttgactatcggagacatacgaaaggcggctgctgagtgcacaggagccgaacacccgaactgtgtgagactgctgtacaagggaaagctactcaagaacgacgcgcagacatgcaaagccgaggggctcaagcagcactccgaggtgctatgtgtggtgtctgacgcagtatcccagagcgatgtctccgatgataacggacaaaacatccctgtatctgcatcagcgccagcacccccgccgctacctcgccccactagtgcagggggcgcctcgtcccctcccacctccgcgggtggaaagagcaagaactcgagaaagaagaaacgcaatggcaagaagtcgcccgtcggtgcagaagcccccggtccctctcggtcgccacggcctacatcgtcaggccactcaggtgcccctgccgcgtcgcctaacatcaagttgctgcgtactccgctggaacaggtcaatgctctggcggaatggttcgagcaggagatgaagccgctctgcgatgaatacattgcgtatccgcctagtgacaagaagaaacgaaactttgagaataagaaactgagcgagacgatcctcacacaaatccagttgaaggcggatggaatcgagccaaatggtgacgagagggcgcgcagtgcacgccgggccctcatcaaggatacgcaggcggttctcgccgagctggacaaacttgtacagccgggagatttgtaattggtctacatacatatgtagacacttacctccgtacaatatgtatcaatctcataccaagggctgttctaccggtcaagtttccattttgctgggacctgtccagcccctcggggtggcattggcatattgtgatatatcaaccttgctatttcccctactaaacctgtcggaatgatttgccggcatgtatacatacccttttcgtatttcccctctctttcttccattttccccgtatacccaaattgggggagctcacaggaggttctcaccgttgtctagatcactttagtggcatctcggaatgatcaacatggctcaggggcaatgcacggcccagaactaaagttgcgagaatcgagatttttcttaaatcatagtctattgaacatttagaacgattattgattaatatgctgtaagagagacatatgatgcatgcctgggaggatgcgataacaaataccgtagtccatcctccgtactccgtagtatgtactgagtggacttggtttccacctactattcccagtctggctacctttcctccagggctctccttagactctccctcttgctctttttttttccctatcttgatcttctcttctttacattctctcctcttttctcgaactttcatttattctacctccttgccataattggtaatcgacctctccttgcctcatcctcccggccccgcgagacctcgaagaagccttccacgggaccagccaccccccgccagcagctcttgtcgaaccaaacttgacaaactggaccccctgcagttgtgctcaaccctacggctgtgttgacaatttgctgttttcggtgtaccccttacgctctaccttgcgactctacctggaatggcttgacccgacaagtcaacccatctctaccgcaatctctactactgagccgggttacagctggactggcctttttttcatttgtgaacaataacctctggaatggcgggtgtcgctacagcggcatattccgcagatgccttagcatcgcccgtggatggctcgctatgggattttgcggtaccacttgtgcacgaggtaagattattcggtgtggcattctagtctctgacctggtagcccaagaatgtgggaaagaaaaaaaaaagcgctgatccccttttcccccgcaggataaccaccactcatcgaaacaacgtgagtcgcacgactcgaactcaatcggcgcaaaattctctcgacagcgtacctcgaacggctcacgcagctcctcggtctcgcgcaacgtacacgcacatgaatcgccctatctagcctcgaaccgaggacggagggaacccagtctcaatcgacatgggagtgaagtaggcagtatgcgagatgcttttggttccgaggcagccggtcgtaaagagcccgaagaggccgatgatgatcttcaactgagtttagacggaaagacgaaccaggaaaaatggatccaccgagacaagctggcaaagatcgagagtgaagagctccaccaagcagccattctcttccagcgacggatgagaggagagagcaaatcgagtgtgggacgtggaaggagctatgattcacaccagagtcctgctaacgggactggtacagcgacctcgcccgctgcagaatattccgaaccctggccgaaagtgaaagaagaacccggcaagaggggtgtgaacaacaatgtaggtggcagtgtgcgggaacattgggatctccgccgaccagaggagattgctgcggacgatgcagccgccagcctctacagccaccctggccttggaaaaagcgcctcccgaatacccatctctacggctagtccagttcccatcctcggccgcgattctggcagttcaaggagccgtgccgcaacagatgaagaagaccggtcttcacggaaccgtagagccagcgaacctatcaccatcgagcaagatggttcgactccttctccacaaagtcgaccaggcagtcgtggattcagcagtacacagaacacgggcaagaagacagtcaagagctctacgaaccgaaagacctctgctccacctgcgaacaggaagacgagcactcctcgatctcgcgctgtctccggtaacaacacacagcgccctaccacccggtcaggtgaaagtcgtcttccaacaaccgctaaccgacccgaaggagacccgccttggttggcaaccatgtataagcccgatcctcgccttccaccagaccaacagatgatcccgaccgtcgccaagaagatgatgcaggaacgctgggagaaggaaggccggacaccaaacacatacgaccgccacttcgcgcccctcgcagtgcacccattcgatacgccgcctcctgtagccaccaaggctgagccagaaccgcaaccacaaccgcaaccgcaaccagttgagtctctacagctcgaggatttgtcacctcggccatcaaagagcccagaaccgccccgcccgaatacaagcaccggctacagcaccatgcccaaggtgcaggaaacacccccaatgggattagcacctaaccccaaccccaactggagccctccagttgtcaccgcgcaacagctaccgaagaaagagaagagctgcgggtgctgcattgtgatgtgatggactctcactctacaaccatctgtccaatctctcttctatttccccaacatacttttgatatttgcacatctgcttgattcccttctctgtcatttttttattatttctagcgtctccggcgggatggtgttctgtcggttctgttctgtgattttatatccggcgatctagggcatttcttcgccttgagttcaaatttctccagactgctttttaatttggcatcctccttcaacaccagagcatggatattcttgtttctcttctcccatgcattcattccttgatatttcccttctcatctcctgtgatcattgtgattcctaccgaagtggtaagggggacctcaaaaagctcgctccagattgcgatggatggaatggggatgagagacatacacttcacaataaacataagttgtgatgtgcgcctcttccttcccatcctattacctgcctgtgactttcttgaccccatgattccctttcccttctccaatccttggatttctctccgaaacatctttgaagcctgttttcccatattcccaagccttcttactagcgattttctcctctttttttggtctggtcaggtggatttgtttgccttttgaatgccagataattacggagttaatcagatatcaggttaaatgaatgaacacatacctgcacaaaattactatttgacttgtactcgtaagcatgtagatactgcgccaactagcccaatatagatcaaattgtattttatagacatctacgaactatatgtaccttagctatctagactttacccaaacaagaaaaagcttcccggctgacaaatatcacatgacatcattgccgcatccaatcccgcaatcttgacggaatggccaaccaatcctctcatctttttgcttgtacttgtaccccgccaaatctcctataaaaagagacactaccgcctcctctctttcctcccaaaccgcccaccatttcgtccatctttacccgtcttttcggctccttcgccggcccaaatcccgccgccatgtccgccgcaaagactcgcgctcagtccctcattaacgacaacgctgtcgttgttttctccaagtcatactgcccttactgcgattcttccaagaagttgctcgacagcttgaacgccaagtacactaccctcgagctggatcaggatggtaggtcttttgcttttgctcgcgtgcgagaagaggagttttagcaccgagctagctatatttttgatacgttttttggtctctcttttgaatgaatcgctaatatgagtttattacagaggaaggagctgctatccagagcgctcttgccgagatctcaaaccagcgcactgtgcccaacatcttcatcaacaagaagcacatcggcggcaactccgacctccagggtaagaaggacctgaaggagctccttaaggccgctggtgcgatctaagcggtgatgtcatataaacaagaatctcccgaggcctgagtctgaatatagtctgaggtatatttcgtactctacagcctttattttatatctgccaatccagtcgtctcatagacttcctttcctaggtcttgtagatctatgtaatgtggggagatattttcatgccgtaggactggagggatcaaaagagccctgtcatctttcagcgttagatgcgtattgagtggagcattgctctggaatgtcttgtagtccgacatgggagaaaagtgaacagcgactaactcgtacaggtatgttgatacaaacaaacaaaatcaaagccataacccaaggataaatcagataaccttctgtacgacggttccaagtggcctctcaacaatcgacatcaacccgtcgacaatactcgtccgggccccttcacttgaaacagtcttgccagccaaataattcaaccaaacaagccgactaatccgctcatcagcgacacgccccatccacttaactggcttatcagtcccaggctggaagagcgcgtccaaagcgccgtgcgcatcgcgcatcaaaaccagcgtctgtcccttcggcaccgactttcccttccctgcgccgaaaacagccttgaaatcattcattgaagttccgaagctctcatcctggaactcgctcggccccgcggtcttcttcgccttcgcgcgcgcagtgataccacgcacccatccgtcgcgcagatgcataaagtctgtgttacgagtgggaacgatacggaatgcagtgcggatgccgttttccttgatgatagcagaccaggcggcgtcgccgcggtccgcgtcaaggagaagctccttgagctgctggcgctctggcgagacgagggaggtagcggcggtagtgccaacgccggaaatggccgcgtcagaatcggtagtgagcgggtggattgctgtgtgcaggaggcggcgttgcagctcggttatgtcggatttcgcgacgtacaggccgaccacgtaaacttcaattgagaggaaggagacggtgcggacaccaaggccaagtaattggtattcttcgccttgggacggcgctagatcgtcgccttcttgcttgccttctgttgcttcggatgtggggagtcggattgtgcttgggaagtgagggatggtgcttgttcctgttggcacttgctcgagtctgtcttggccttggatcgttattaatgatgggccaccgctggtgaagccgactggtccgtccatgcgcattgcgccattcttcggaggtgtggagatggtcttgtcatctttgctggtatctagttcgttgaggccgaagaggtctagcttgatcacaccgtagagaccgactgcacagacaatcatgccggctgcggagaggaccatctttcgctgagcttgggaggcatgctggagatccgccgctgcggatgctcgggagcggagggggttattggtggcattggagcggaggggagtggtggagagatggcgagaggagaggcgtgttgtgcggatttgttgccgagtgaggcattgataagtccgccatgggttctgacggagggtggaggccattttgagcttcgttcgttcgatgaggaatggcgagggcaggattggcgggtgacggagatggagtgtggggatgcacgtgatatggcatgatctacattagtataccgtcatgtatcaagagatggtttcggtggaataaggaggtttttttaacttataatgatggagctctactcatctcatgtgaaagctggcacatcttgatggcagttacttaaataatcagtctctaacagaagggctgtggatgcactatgatatgactacgtctggtgcatgttgatatttacttgacaataaccttgtgagagccaccggtcacttcgaagattgctgtatcatcagcataggcaacttctcttatcagctgcttgccatcaatggtgatcaaaggcttcttcgacgcagtgacatagggcaaagtgacattcccaatagtacccttcggcgccgagaaagtcaacacatatccactagaattcaaagcccaagacgccttaaacttcccgagggaggtgacaaagccagcctcggcaaaatccaagtctccaaattgcggcgcgattttccacgtcaatcctagtggcgagaccacagagagaccgacaacaaactctgttaacgcagacgtcggaccagatgaccagccgtgtgcatgtgagacatatgatggatcatagccatatccgcggtccatccgatacccgaaagttccgttccttagatagccctcaattacagtgctctctgtaccattcgggttgttgatataccaaccccagctacgacgaatgaggtccagggcgcgtgcgggcttgcgagcaatgaaatgactttggatctcaaaagatgatatgaacgaagcaatgttctctggcaactcaggagctacggccccgatgggggtccagttcttgagaagcttttctgaaatgctggctgtgtgctcttcgtcaacaacaccgaaaataattgccatactattagcatcttgtggatgtagagaggtatcggttgcgttgtccttgaatgcgccgtacgactcgtcccagcagtaggtgttgattgcttttttgagattgacagcctgggagctccaagtgcttgagagattggctgaatctccagcccacaaagagagagaggctcccgtttgtagcgtatgatagagactagagcgtgttagctgtaaagccttctgcataattgattcacaacgtacatcatctgtgcttccgagttgttataaccttgctgccatctcgcccagtctcgcgtgcctgtcacattcaaaagcccgctgggataagtcacctttccataaatatattccatggcgtgcagataactggcccaattctccaacaagaagtctgtgtcattggtgtaaagcacataattataggtgccaatcatagaccacatatgatatgtgtccgagtccttctggctcaatggaggcccagactcatcaaatgcacctgttgtcttgttctataatccccagaactgtcagttctatgctaaaaatagaacaaacaaaactcacctgggtgttgtacataatctgcaaagcgtttttaacactttccaaatctcccagactcacaaaagcggaaggcacggcaatgcccatgtcaccaggccaaaccgcacgatctcgctttgccccatcaaccataatcgtgtctcctggcccgagagtcccattgtttgcccacccagaggtgataccctttgcaacacgaccagtagtcacaggcacttcattcgtctgcagagtatatgcaccgctataccagatgcggttcaaaagctcatcattgcagtgaaagtacccctgataagctcggagattcgaccaagtgggcttaaatgcgacttctaagctcaaatcatcaatttgaacactgcctgaattgtctgtgatcaagaagacggtcaagtatcggaacccgccccgcagatatttgtccggcatgatatatgtacccttctcagttgacgatatatttgcatacaacgcgccatcatgatagagagcgtttgatgagtccgaccactctccaatccaatttttggcttctgtaaatgctagccctagagctccgctaccggtggaggtatagtctagatggacgatgccaccgacttcaataccgaagtcgaatacaatgagtgatccattgccgtataattttgctttgtatggatgcgaggagtctgccacagcgttcgtttttaactccgataaggttgagactggtcgtactgttcgcgatgccggtgcgtatatgttctcttcccatggcccgctgaatgcagtgttcgtaggcccagaacaagaggtatcacgccagcaagtgtctgcaacagatagcgagaagagagaccaaagaatcaataccacactgcaccagtatgattgtgccattggtggttgagttgaagtagataaataccgcatatcgtaacagcataccaaccttttttaaatacagagcatagcacagatagaaatggctcgaccgtgcaatagtggatatgggaaggttagttaccccatattcgcgattggtggaagaatcagggcaaacgatgttaacacttgtaggactttggcaaggatcggcgaaacaagcactcataagacttcgaaatcatgtttttactgcataaaccatctagcctagtcttttctcgcagtaaattttctccgcaatgtcatgttgccatgtccgctcggtgtaaagaccgaccgagtgcaacatgggaaattcgagcaatgtgcggggttctatagctagggaatataagacctcgttttttattagaaaaatatccaattgagcagtccgatccgagctcacaatgcgattcttcggcattccttccctagccatgcccctatggctgactgtgtcaccatttgtatatgcaaatgaagaacgcagctcaaatgtttgcattgtcaaagccaatgggcaccagagagatgacgtccctaacatcctagaagccttccaacggtgtggcaatggtggtactatcatatttccagaggaccaagcctactggattggtactcggttgaaccccgttgtaagcaatatacaaattgaatggcgcgggaaatggacagtaagtgggctgtcactgtatccaatgataaacgcaactaatacgagctagttctccgacgatttggattactggcgtaatcactcatatccagttgccttccaaaaccacgctgctgggttcattatcacgggccacaatatcacgatcgatggatacggcactggtggtatcgatggtaatgggaacacatggtacacagccgagaaaggcgacacacagcccggtagaccaatgccgtttgtattttggaatgtatccgatgttagtgtcgaaaatttctacgtcaaagacccccagttgtgggctgtaaatatcatgaacggaaccaatatgcgcttcaataacatctactgcaatgcgactgcggtagatgcaccatacggcgaaaactgggtccagaatacagacggatttggtatatccacccactccggtttcctcgcggccaactaacactatggatagacacaatggacgtgcagaatgtccaactcagcaatttcgtctaccaaggtggcgatgactgcgtggcgattaaaccgcgatcctacaatgtcgatatccacaatgtcacctgccgtggtggaaatgggattgctataggcagtctgggccaataccaggaagactcaagtgtggctaatatccgcatcgatacagtcaaggtgatccgatacaacgatgacatgcacaacagcgcgtatatcaaaacgtgggtcggcgcacttgtaccgcagagctcgtatgagaatgctggactccctcgcggcggtggctggggcagcattcggaatgtgttgttctcaaacttcgaagtccatggagccaatgctggacctactgtcaaacaggacaatggaaacaatggctcgtattcgggaacaagtttgatgagtatttccaatgtcgcatttgtaaatttcacgggctatattgagagtacttcgacgagtgtggcatctgtttcatgctcaaatgtgcatccgtgctacaatatcgattttgataacgtgattctatacccccaagagaatgcaacgacgccgggaattgggtcgtgcaagtatacattggaaggaggggtacacgggctcgatggatgctgaaaattcttcataccagaaacacaagcaagtaaggggacataatgtcagaatctaggatgaatactgtcatttttcatccctgatacagttggatcacgtgactnnnnnnnnnnnnnnnnnnnnnnnnnnnnnnnnnnnnnnnnnnnnnnnnnnnnnnnnnnnnnnnnnnnnnnnnnnnnnnnnnnnnnnnnnnnnnnnnnnnnnnnnnnnnnnnnnnnnnnnnnnnnnnnnnnnnnnnnnnnnnnnnnnnnnnnnnnnnnnnnnnnnnnnnnnnnnnnnnnnnnnnnnnnnnnnnnnnnnnnnnnnnnnnnnnnnnnnnnnnnnnnnnnnnnnnnnnnnnnnnnnnnnnnnnnnnnnnnnnnnnnnnnnnnnnnnnnnnnnnnnnnnnnnnnnnnnnnnnnnnnnnnnnnnnnnnnnnnnnnnnnnnnnnnnnnnnnnnnnnnnnnnnnnnnnnnnnnnnnnnnnnnnnnnnnnnnnnnnnnnnnnnnnnnnnnnnnnnnnnnnnnnnnnnnnnnnnnnnnnnnnnnnnnnnnnnnnnnnnnnnnnnnnnnnnnnnnnnnnnnnnnnnnnnnnnnnnnnnnnnnnnnnnnnnnnnnnnnnnnnnnnnnnnnnnnnnnnnnnnnnnnnnnnnnnnnnnnnnnnnnnnnnnnnnnnnnnnnnnnnnnnnnnnnnnnnnnnnnnnnnnnnnnnnnnnnnnnnnnnnnnnnnnnnnnnnnnnnnnnnnnnnnnnnnnnnnnnnnnnnnnnnnnnnnnnnnnnnnnnnnnnnnnnnnnnnnnnnnnnnnnnnnnnnnnnnnnnnnnnnnnnnnnnnnnnnnnnnnnnnnnnnnnnnnnnnnnnnnnnnnnnnnnnnnnnnnnnnnnnnnnnnnnnnnnnnnnnnnnnnnnnnnnnnnnnnnnnnnnnnnnnnnnnnnnnnnnnnnnnnnnnnnnnnnnnnnnnnnnnnnnnnnnnnnnnnnnnnnnnnnnnnnnnnnnnnnnnnnnnnnnnnnnnnnnnnnnnnnnnnnnnnnnnnnnnnnnnnnnnnnnnnnnnnnnnnnnnnnnnnnnnnnnnnnnnnnnnnnnnnnnnnnnnnnnnnnnnnnnnnnnnnnnnnnnnnnnnnnnnnnnnnnnnnnnnnnnnnnnnnnnnnnnnnnnnnnnnnnnnnnnnnnnnnnnnnnnnnnnnnnnnnnnnnnnnnnnnnnnnnnnnnnnnnnnnnnnnnnnnnnnnnnnnnnnnnnnnnnnnnnnnnnnnnnnnnnnnnnnnnnnnnnnnnnnnnnnnnnnnnnnnnnnnnnnnnnnnnnnnnnnnnnnnnnnnnnnnnnnnnnnnnnnnnnnnnnnnnnnnnnnnnnnnnnnnnnnnnnnnnnnnnnnnnnnnnnnnnnnnnnnnnnnnnnnnnnnnnnnnnnnnnnnnnnnnnnnnnnnnnnnnnnnnnnnnnnnnnnnnnnnnnnnnnnnnnnnnnnnnnnnnnnnnnnnnnnnnnnnnnnnnnnnnnnnnnnnnnnnnnnnnnnnnnnnnnnnnnnnnnnnnnnnnnnnnnnnnnnnnnnnnnnnnnnnnnnnnnnnnnnnnnnnnnnnnnnnnnnnnnnnnnnnnnnnnnnnnnnnnnnnnnnnnnnnnnnnnnnnnnnnnnnnnnnnnnnnnnnnnnnnnnnnnnnnnnnnnnnnnnnnnnnnnnnnnnnnnnnnnnnnnnnnnnnnnnnnnnnnnnnnnnnnnnnnnnnnnnnnnnnnnnnnnnnnnnnnnnnnnnnnnnnnnnnnnnnnnnnnnnnnnnnnnnnnnnnnnnnnnnnnnnnnnnnnnnnnnnnnnnnnnnnnnnnnnnnnnnnnnnnnnnnnnnnnnnnnnnnnnnnnnnnnnnnnnnnnnnnnnnnnnnnnnnnnnnnnnnnnnnnnnnnnnnnnnnnnnnnnnnnnnnnnnnnnnnnnnnnnnnnnnnnnnnnnnnnnnnnnnnnnnnnnnnnnnnnnnnnnnnnnnnnnnnnnnnnnnnnnnnnnnnnnnnnnnnnnnnnnnnnnnnnnnnnnnnnnnnnnnnnnnnnnnnnnnnnnnnnnnnnnnnnnnnnnnnnnnnnnnnnnnnnnnnnnnnnnnnnnnnnnnnnnnnnnnnnnnnnnnnnnnnnnnnnnnnnnnnnnnnnnnnnnnnnnnnnnnnnnnnnnnnnnnnnnnnnnnnnnnnnnnnnnnnnnnnnnnnnnnnnnnnnnnnnnnnnnnnnnnnnnnnnnnnnnnnnnnnnnnnnnnnnnnnnnnnnnnnnnnnnnnnnnnnnnnnnnnnnnnnnnnnnnnnnnnnnnnnnnnnnnnnnnnnnnnnnnnnnnnnnnnnnnnnnnnnnnnnnnnnnnnnnnnnnnnnnnnnnnnnnnnnnnnnnnnnnnnnnnnnnnnnnnnnnnnnnnnnnnnnnnnnnnnnnnnnnnnnnnnnnnnnnnnnnnnnnnnnnnnnnnnnnnnnnnnnnnnnnnnnnnnnnnnnnnnnnnnnnnnnnnnnnnnnnnnnnnnnnnnnnnnnnnnnnnnnnnnnnnnnnnnnnnnnnnnnnnnnnnnnnnnnnnnnnnnnnnnnnnnnnnnnnnnnnnnnnnnnnnnnnnnnnnnnnnnnnnnnnnnnnnnnnnnnnnnnnnnnnnnnnnnnnnnnnnnnnnnnnnnnnnnnnnnnnnnnnnnnnnnnnnnnnnnnnnnnnnnnnnnnnnnnnnnnnnnnnnnnnnnnnnnnnnnnnnnnnnnnnnnnnnnnnnnnnnnnnnnnnnnnnnnnnnnnnnnnnnnnnnnnnnnnnnnnnnnnnnnnnnnnnnnnnnnnnnnnnnnnnnnnnnnnnnnnnnnnnnnnnnnnnnnnnnnnnnnnnnnnnnnnnnnnnnnnnnnnnnnnnnnnnnnnnnnnnnnnnnnnnnnnnnnnnnnnnnnnnnnnnnnnnnnnnnnnnnnnnnnnnnnnnnnnnnnnnnnnnnnnnnnnnnnnnnnnnnnnnnnnnnnnnnnnnnnnnnnnnnnnnnnnnnnnnnnnnnnnnnnnnnnnnnnnnnnnnnnnnnnnnnnnnnnnnnnnnnnnnnnnnnnnnnnnnnnnnnnnnnnnnnnnnnnnnnnnnnnnnnnnnnnnnnnnnnnnnnnnnnnnnnnnnnnnnnnnnnnnnnnnnnnnnnnnnnnnnnnnnnnnnnnnnnnnnnnnnnnnnnnnnnnnnnnnnnnnnnnnnnnnnnnnnnnnnnnnnnnnnnnnnnnnnnnnnnnnnnnnnnnnnnnnnnnnnnnnnnnnnnnnnnnnnnnnnnnnnnnnnnnnnnnnnnnnnnnnnnnnnnnnnnnnnnnnnnnnnnnnnnnnnnnnnnnnnnnnnnnnnnnnnnnnnnnnnnnnnnnnnnnnnnnnnnnnnnnnnnnnnnnnnnnnnnnnnnnnnnnnnnnnnnnnnnnnnnnnnnnnnnnnnnnnnnnnnnnnnnnnnnnnnnnnnnnnnnnnnnnnnnnnnnnnnnnnnnnnnnnnnnnnnnnnnnnnnnnnnnnnnnnnnnnnnnnnnnnnnnnnnnnnnnnnnnnnnnnnnnnnnnnnnnnnnnnnnnnnnnnnnnnnnnnnnnnnnnnnnnnnnnnnnnnnnnnnnnnnnnnnnnnnnnnnnnnnnnnnnnnnnnnnnnnnnnnnnnnnnnnnnnnnnnnnnnnnnnnnnnnnnnnnnnnnnnnnnnnnnnnnnnnnnnnnnnnnnnnnnnnnnnnnnnnnnnnnnnnnnnnnnnnnnnnnnnnnnnnnnnnnnnnnnnnnnnnnnnnnnnnnnnnnnnnnnnnnnnnnnnnnnnnnnnnnnnnnnnnnnnnnnnnnnnnnnnnnnnnnnnnnnnnnnnnnnnnnnnnnnnnnnnnnnnnnnnnnnnnnnnnnnnnnnnnnnnnnnnnnnnnnnnnnnnnnnnnnnnnnnnnnnnnnnnnnnnnnnnnnnnnnnnnnnnnnnnnnnnnnnnnnnnnnnnnnnnnnnnnnnnnnnnnnnnnnnnnnnnnnnnnnnnnnnnnnnnnnnnnnnnnnnnnnnnnnnnnnnnnnnnnnnnnnnnnnnnnnnnnnnnnnnnnnnnnnnnnnnnnnnnnnnnnnnnnnnnnnnnnnnnnnnnnnnnnnnnnnnnnnnnnnnnnnnnnnnnnnnnnnnnnnnnnnnnnnnnnnnnnnnnnnnnnnnnnnnnnnnnnnnnnnnnnnnnnnnnnnnnnnnnnnnnnnnnnnnnnnnnnnnnnnnnnnnnnnnnnnnnnnnnnnnnnnnnnnnnnnnnnnnnnnnnnnnnnnnnnnnnnnnnnnnnnnnnnnnnnnnnnnnnnnnnnnnnnnnnnnnnnnnnnnnnnnnnnnnnnnnnnnnnnnnnnnnnnnnnnnnnnnnnnnnnnnnnnnnnnnnnnnnnnnnnnnnnnnnnnnnnnnnnnnnnnnnnnnnnnnnnnnnnnnnnnnnnnnnnnnnnnnnnnnnnnnnnnnnnnnnnnnnnnnnnnnnnnnnnnnnnnnnnnnnnnnnnnnnnnnnnnnnnnnnnnnnnnnnnnnnnnnnnnnnnnnnnnnnnnnnnnnnnnnnnnnnnnnnnnnnnnnnnnnnnnnnnnnnnnnnnnnnnnnnnnnnnnnnnnnnnnnnnnnnnnnnnnnnnnnnnnnnnnnnnnnnnnnnnnnnnnnnnnnnnnnnnnnnnnnnnnnnnnnnnnnnnnnnnnnnnnnnnnnnnnnnnnnnnnnnnnnnnnnnnnnnnnnnnnnnnnnnnnnnnnnnnnnnnnnnnnnnnnnnnnnnnnnnnnnnnnnnnnnnnnnnnnnnnnnnnnnnnnnnnnnnnnnnnnnnnnnnnnnnnnnnnnnnnnnnnnnnnnnnnnnnnnnnnnnnnnnnnnnnnnnnnnnnnnnnnnnnnnnnnnnnnnnnnnnnnnnnnnnnnnnnnnnnnnnnnnnnnnnnnnnnnnnnnnnnnnnnnnnnnnnnnnnnnnnnnnnnnnnnnnnnnnnnnnnnnnnnnnnnnnnnnnnnnnnnnnnnnnnnnnnnnnnnnnnnnnnnnnnnnnnnnnnnnnnnnnnnnnnnnnnnnnnnnnnnnnnnnnnnnnnnnnnnnnnnnnnnnnnnnnnnnnnnnnnnnnnnnnnnnnnnnnnnnnnnnnnnnnnnnnnnnnnnnnnnnnnnnnnnnnnnnnnnnnnnnnnnnnnnnnnnnnnnnnnnnnnnnnnnnnnnnnnnnnnnnnnnnnnnnnnnnnnnnnnnnnnnnnnnnnnnnnnnnnnnnnnnnnnnnnnnnnnnnnnnnnnnnnnnnnnnnnnnnnnnnnnnnnnnnnnnnnnnnnnnnnnnnnnnnnnnnnnnnnnnnnnnnnnnnnnnnnnnnnnnnnnnnnnnnnnnnnnnnnnnnnnnnnnnnnnnnnnnnnnnnnnnnnnnnnnnnnnnnnnnnnnnnnnnnnnnnnnnnnnnnnnnnnnnnnnnnnnnnnnnnnnnnnnnnnnnnnnnnnnnnnnnnnnnnnnnnnnnnnnnnnnnnnnnnnnnnnnnnnnnnnnnnnnnnnnnnnnnnnnnnnnnnnnnnnnnnnnnnnnnnnnnnnnnnnnnnnnnnnnnnnnnnnnnnnnnnnnnnnnnnnnnnnnnnnnnnnnnnnnnnnnnnnnnnnnnnnnnnnnnnnnnnnnnnnnnnnnnnnnnnnnnnnnnnnnnnnnnnnnnnnnnnnnnnnnnnnnnnnnnnnnnnnnnnnnnnnnnnnnnnnnnnnnnnnnnnnnnnnnnnnnnnnnnnnnnnnnnnnnnnnnnnnnnnnnnnnnnnnnnnnnnnnnnnnnnnnnnnnnnnnnnnnnnnnnnnnnnnnnnnnnnnnnnnnnnnnnnnnnnnnnnnnnnnnnnnnnnnnnnnnnnnnnnnnnnnnnnnnnnnnnnnnnnnnnnnnnnnnnnnnnnnnnnnnnnnnnnnnnnnnnnnnnnnnnnnnnnnnnnnnnnnnnnnnnnnnnnnnnnnnnnnnnnnnnnnnnnnnnnnnnnnnnnnnnnnnnnnnnnnnnnnnnnnnnnnnnnnnnnnnnnnnnnnnnnnnnnnnnnnnnnnnnnnnnnnnnnnnnnnnnnnnnnnnnnnnnnnnnnnnnnnnnnnnnnnnnnnnnnnnnnnnnnnnnnnnnnnnnnnnnnnnttgttttgtttgttttgattactaagttgtccatcagattgtcatgttttaggactattgtcagttttagagagttagagaatttattaagatttttctgccacaaaatacactcgccttaccaccgtttttccgtcacataaaaaccgaatctgaggttatctagatcggcaaatttgcttttcattgcgagtatgtgcagcaatcaccttgattctaggcataaggaacagagacttcaggcatcgtgttcttaaaaatagcattgctaatattgaatcagatttctgtaaccttgggagaaaaacaagacaattaatacttaagcataaatcgaaccataaagactgaccccgcagccccacctgagcacttccctatatgacgttcgttcccaaggttgattaataaattaataatgtcgctgtagcttcttttaacctcatacccaccccactgattgtctaagtccaggctataatgccacaggaaacagttcgacctgcatttgagggccgtgagcgcccacttctttcctatggccttgcctttcccgcagcgacagcacgccatcttgatgacatattccaggcttcccgtgtatatgtgatttgctcagggtcattggcgcgtaataccgatgtaatgaaccagctggaggctgctctggggccagataagctggttggtcattggatcggtatgcgaagccacactttgtggtcagaggtgctgcagattgccgaagaggttaggactgtgcatgctgatctgctattgaccgttggagctggcagcttgactgacggcgccaagatcattgcattagtaagtatacctttttctttcatatcttcattctgtttctgtttgcggtcttcttgtctcttcttatcattccctggaagacctatatatttatttaatatcagcctaacatccccttcaggcccttgcaaatcaagtcagtacaccagaagagctcgaaacacttgcagaaggccccaaaaagcgattgggaatcaaagctccaacgctcccgattatttctgtgccaacatctctctccgccggcgaatactcaaacttcgcaggcggcaccgaggaccgctcaaagcgtaaatacagcttccaaaatccaattcgcggaccggagctggttattctcgacccggagctggcgaaaacgactcccaattcaatctggctcagtacaggtgtgcgcgcaattgatcattgtatcgaaaatctgtgctcgacatcaggtaccactccggaatcagacaaactggctcgggatgcgctagggttgctggtccctggtctcttgcgctgtaagaatgaccgatcagaccgtgaggcgcacctacagtgccaacttggatcagtggatgctatggcagcctgtactagtgggtcaatcgaattgggtgctagccatgggattggacatcaggtaggcgattgctttcctttatttacattataagaaacccacaatgcaccaatgggcctggcttacagttctctagcttggtccactgggtgtcggccacggtgagaccagttgtatcctgctacccgctgtgtgtaagttcaatgctaagtacaacgccaaccgagaaaaacaagctagtgtgtgccaatttttgattcaagatccggtcgtgtcggaggtgctacgtgcccgctcggtcaacgtggaagcctctgacttgggcgatattttggatgctatcatccgcgaattgggaatgcctcggtccttgagcgatgtcaaagtagggcgggatcagttggatggactggcggagaatagcctacatgaccgttggtgcaagacaaacccagtaccactgaaggagaaatcccaggtactggaaatcttggaaatggtagtttaaagacgagataatatgctctttcacatttggataattgagacatccacggactaatctcggctttcaaataacccacctatcagttcagttgtatggctgaggtcataggggctttatatacttccgatggtgatgggattggcatatcgacagatatttctaaatgcgtcgctgtttcaggataacaataatagccgtcacggtagaaaaggcatgcatttatcaagtttcgttcaagtttctaaattacagttcctagttttggtggtggcaacgtcctatatctacactgagacatgtagacatcctaaccacttgggtatttccaaccctaaatgcattatacaacatatctttcattctacaatatctaactaaaatacagattaaatatgaagcttgggagcctctttcaattgattgataagcaggactccaccccccacatttcacgttatacataagctcgcgtcatttccgtctctaggactgcactgtcgacacagcaactatatacaactatgtctctcgccaagaatatccttctattcggcgcaacgggcaacattggctccttcatcctggacgccatcttgaccgagcgctcccaattcggccgcgtcgccatcttcacttccccgcacactgccgaaaccaaagcctcgcagctgaataagctgaaagagcaaggcgtagaagtgattgtgggtaatgtcgaagatgagaatgccgtgaaagcagcatacgaaggtagcaaaccctctcttcgtatccctacttatctaactgcccaaaccaccaaaccaaagactaaccactaagtcgaacaggaatcgataccgtaatttcagcactgggccgcaatgccctagctcaacagatccctctcataagactcgcagccgccagctccactgtgaaatggttcctgccctccgaatacggcacggatatcaagtacgggccagcttcggcgaacgagaagccgcaccaactgaagctgaaagtgcgcgcatacctcgaggatgagagctcgcgtgacgacctcgcctattcgtatgtagttaccgggccgttcgcggagatgtatcttaatctcgtgcctgggttggagacggctggtgggtgggatgttaaaggtcggagggcagttctattgggcgagaaggggaagggcgaggttagtttgacgacgatgaaagagtaagatttcttcccttcactattttggtgtttgtttcgttgggatggatgggctattggctaactattccgctagcgttggaactctcgtcctgaacactctgcttcatgctacggctgagacgcggaacgctgccttgtgcgttaattcgtttactacgagccctgaccagattcaggcggaatttgaacgccagcttgatggtcagccgtgggatgtgtctcgcacctcgctggcaaagttgcgcgaggcggaggctgcagcgtgggaggctgggaatccggcggctactctgttgactttgcgtcggatctggggtgaaggcggaacactgtacgcgcagcgggctaacggattgattggggagccgaaggtgatgagcctgaaggatgtggttgcgaatgagatccagagggtatcgaagttgtagatagcttgtcttcattgtttcattttttttcattatcttaatttttacatgctagttggccacacaacaaaggcgacatttgatctacatagacatcgcgcacactgtggaatccaacgtttaaagctcatcgcattcgtacgtaggaactaagaataaaagaaacatatcgggggttcaggtaacttcagatttcacatgaccgaggggaatgatttggaaaaggataaaaaagggggaaaagctctgccggatataaaacaaaaggatctgagctttattggaagaacttgcgcactctttcctggctagccgggtccacagaagccagaatctggtctgcatttgcgccggttacttgcaccagctgcttggcggatgtggccacccgggtagcggtctggccctgcagagtagccgcctcgagtgcctgaacgatgaaaccgaagacacggtcagccttggcaaagacggccgggttgtgcctggtagtaagatattagcatgagtatgagggtcttcatcaagaatacttactggtcaatcaactgtgcaatgaaggaataggcataaggagcagcctcctcgtcgtaggtaatgggcaaagtctcgatccagttggccacgacatcctgaggagcctgaaccttggacgggttgtagtgcaggatcttggcaatactggcagatgcattctcggtcgcgaacacattctcctctgtgcgggattgcgcatgctgtgtaacctggaacaagctggggaggctggctgccacaaattcgctccaggcggcaccacccttctgtgcggccacaccaactccatacgccgctgcctgacggttagcggcattctcatcccgcaaaccggaagccaaaggctgcatgatatgatccttgtatgcccacgactcttcaccacagaactcgagcacgtcatccatgatgcaaagagcccactgccgttgtgtcgggtcctggcttgtgataaaagcgtcgtagaatggaatcaattgctgccaggtcggcaggaacgtgttgccctggttcttaaagatggtgtggaacgccttgttcatatcgctcaataggttttgatcgtcctccacggcgtactcaaagtccaggttttcctcgtcaccatcttcaagctcagcctgctcctccaaacgttgcttcacgcgcatctggtagtcctcaagggtcgacttcgccgattcaatgaacgcctgcaagtgctggggggtgagggagtttctgccaacgacctctactgactcgtagaagcactggtacatctcagccagcgtgtcaaccgtcggctcagcgctcagaacctcgatgatcttctcggcaaccttgttccacatttcggcaaagcccggcgactggccaccgtgtgccttcttgtaagagttcaggagctggggaatcagcttggcagcggacactcgaacggggtcgtggaagaagaaggcaagaccagggactgcgatcttctccatggtttccaggacgtaaggctcgaagttctcctcgagaatttgggcatagatcgtgatcaattcgatagcggtattcttgtcttcaagagcactggtcttgataccaataatcttgcctttgagtggcactatctcccagccatcatcctgctcaacctgttcgatctgttcctcatcatctagcagctggatatcggccttggcagcagccacggtgagaagaggcggcataacaccggggagataaggtacgaagtctcggcctaagacgcggcacatgcggccccagcagtgaaggaggtactgtgactgtgggtcgtcggcgtcgacaatgttttgctgaatgtggccgagaatctgcacaaggttcagggcgtcttgacccatcttctccttaccaacggccagtgcgatcagagtagcacactccatggccttggcacgaagaaggcggtactccttaccctgttcctccttgagaacattgagcaaaagaggcatcaaagtggtataatactggtcgaaggcggcctcggcagaatcagcaatagtggcaatagtggacagcgcctgctcctgcagataacgcttagggctgcgcaagagatccaggagatggctgagaaggtttccgaggtatggctccaaggtgctgcgctccgcctcctcgcagaaattgacaagagcagcggcagcgtgggactgcacacgcggctcggtagaggcaagaacgggaatgatgttagtgaggacaatctcgtgatacttctcctgcatggtaccggcaaagtcggtgctcatctgaccaagagcattgcagcctgcataccggactcgggggtgagggtcttggagggcaggaacaacaagcgctaggacttggtcgagttcaccgaccatcaggtcgcgacaaccttcggagatagcggagatggccatcaaagcagcatggcggtcgcgccagttggtagacgacatcatgcgaggaatccaagagaatgcgggctggaggatggcctgtccacccaatttgttggcgagacgatccatgcactgctcaccggcgatgtggttgagatcgttctcttcaggctcaagctgttactggtcaatggcatgtcaattataacgacagaaatgccaacacttacatcttcagacgcgttccattcctccgcatcgtcgtcatccgcaccgacatcagtcatcagactcagacattgtgtgaccatttcctgtgcgaactccggctccttcctgcacatatttggggcgtaatcggcaaaggtggccatcaattcgagtgcgttctggcgcacctggtcactgagctccttgtcgccaatgacactaatgctgaacttaactaagttgttgaacatgaccttgaacatctttgggcagatttcagccaattcgatcagggcttggagtgccgaggacagttcctcgctctcagaggactccttgagaggaggaaggatgttgagaaggtctggcatgaggccgaagaatttaggctgggactttctggagattgaccggaacaacgaagcgaaggcttccatagctgaaattcgcacctgatgaaatggtcaaaattgagttcgaagggcatatccagatgtcgacatacggaaatattatcgtccttgaaacccttggtaaaaaccgccacaacagcgtcttcgtgctgctgttcaatgataccgggggtggtcgtgaacacacggtatgcggtttcccgcaggcccgagtcagggctctggcttgcctggaatagaacaccgagaagttcgggccactgttcgtctacaatcacaggtgaaatcgtcagaactaagagtcctcattttgtcaagggttgttcgaatcgcataccattatcggtgtattgcctcgccacctcagcgagtgtgtctccaatcttcttgcgtacatcggtgacggtctcactggttagacagatcaccaatttctcgcggatggcgattcgctgctcgttgggtaggctcgagaaaatctccctgctgtcacctgtggcgggatccttccgggtttttgtcgcgattcttcggaaaagcacagcggcgaaagcacgcatctgtaattaaaggtctcccatcagttattgatcccaaatcacattgaagttcggctgctggcctggtcgtcgatcgtttgcaacaccactccttcgaagcagccacacccctggagtccggtgtaacttactattgtgtcctctgcacccccaagctgttccgccaatcccatcaagaggacatctggtcggttcagaacccagtcattgttaagctggtcttccgcctgggatctgacgacattgtcgggcgtgctcaagccgcggagcagctgagaaagcgcggtgtggacttcgggaggtaggagggacatgttgggcgtgtctgttcccaagttccagacgatccaagcaacccagttctttcaaccctcgtagaagtaatttggtggggatagaggggtggaacgaaggaggagttttgtttttggtggggcggggagagagggaaaaaagaagaatttctgatggataggtccttggaagtgaagaagaacggaagtgccagtcgaataacacaacaagagggagagagattcgactgaggatatcgaggtcttagaatcgggtacttctcgacaaagattgcaaattaactgcacgaaaatccaaggacaacctacaaaagtccataatcgtatctggagctaagccaaatgcggtaatttaaggccacaaggccaactcagatcgaacagacacaactatgaagacctcaaacaacttacttatttgtacatacaaatcgttagatcaaagtcgacctcgaacaattatttgcattgaaggctaaactacctaggtaacgccgcaactgctcatacgaacagcggtatctgaacgcgacacggaatatcgatattagaaaacaaaacgggtatgcaacactccggacaggaaaagaatctactacgctatctcaggttgcttgatatccaagttgattgagagaaaggggagtttttgaagaaagagggtttcgggaatgccaaatatttttaccggtgaccggggcggctgagaatgaacacacccacaataaccgcagccaatgtgacaatagcaccgggcagcagcaagtcgttggggacaccggcaatatattgctcctctggcgcgtgcaagggcacgacttgtggctggggtagggccttgctcactggggagtcttgtgatgtaggttcctcagcagagctttgctcttccataggagtcacaatcttaacatgatgaggttcaaacacagtgttaggtgcctgggcggggtcgtggacaaataaattgaccttgtcgcggtgagtgcggcgggccagatcgatggcatccgtcatatcctggtccgtggtaatggagacggtatcgccttcgttgtccatatagctgagggcatatccagtgtggctcagccgaccctcctcaacagtggcctcgccaccaacatcctcgacttccttgccaagtttcgccgtgacttgcaacacaaggtcggtaatgccgctggtggtaaggacgttcacacggtgcactcgaccaccaggggctttgaacttgaaggggaatggagtaggagcggctggttctattgggtagtgctgagagatagcggaatgatcatcaccgtggtgcgatgctgagtcgttggggagaagactgttgtcgtagcctgagcgagtgaggtcgggactgataactgagcggtgtggggtattcagttgctggctgtggccgccagagaccatggagtctgactcgtgatccattgataaccaaaatttgttccaagcggggccctcgtcatcttgggttgacatggtgttgatctgaatacattagtcaaaatttttgcatgtcagatctgtaactttcaaacatacctgttcaagagtggcatatgtaagcttcaacacatccaccatgccaacgatttcaccaccctcgttcatcacgggcaggttaagatagtggccatctgttgtagagttagcatgcttcggtttgaaccgctgactgaaatgactgaccatgcatcttgcgaagtgcggcttggatgctcatatccgacggggcgaaatcggggtgaggagtcatgacacggacaacactgcaagtagatggatcaaggccaggagcaataacgcgaagaacgatatccttgctagtgaatataccagtgatcgagccttggtcctggactagcagagcagtagtgtggttttccttcatcagagccgcagcgtccttgacggtggtgcggaccgagacagtgaccggcggcaagccatccaagaccgtctcaagagtcggaccggacatcttggatcgcaatgcctccacatattggataacttgctggggctgactggagccaagctctgtctgcacaccttccagcgcatcgtacagcttgcgagacgaactgtatgcgcgctccaatttttccatagcatcgtagaagcacttggtaatatccaaaacaccagagatatcctgattctcatccatgactggcaaatgtctgaatccctttcgcaccataagatcgagggcatcggtagcgctggtgtccgttctcgcgcacagcgggttcttggtcatgatttcagcgacagagacgtctcgcgccttcaggcccattccgacgactcggaacgccagatccttggcagtgaaaatacccgagatgcgctcattatcgtcggtgaccaacacacagtcctctctcttcgcggccataagctgggcggcctctgcgatactcatggtcggcttgatctggagggcttggctgggcttcagggcgagcaccgtaccgggaggcgctttgcgggagctcctcgattttgccggagtattcctttttttgctgaggtcggcctccattttgcggcggatggccttgtgtcgagattagctaaaagccgaggctcaaattgaccatcaggagatcactcccgctagctgccataacgtacctcatcacgttttgactggttctgtcgctgtctgctacttgcggcgctcattgtgccagtgccagtgctagtgggagtcccgacgtcgctagtggctgttgtgcttataacagaggaatctggtctggggggtcgggggatgtgggaagcgctaggatcgctcgcgaaatcgggcagccttcctctcccgatcgtctgattgggtttcccccgaaaagtacctgtggccgacataataatgccgaaaggggaaagtctcagtaaaaaaaaagagagaaaggagatgacacaaacagaacaaggatgtcaagttgtgagactggtatgggagaaaaagcaaggagaaatcctaggaaggagaagaaaaatgggcagttcaatagtcgatcccaaacaggggtgttccttcgttagtcggggttggaggaaccataaacacggagtgacacggtacgatccggacgctagtctgaattaggcgaaaatactgctcgtgaccttttacacatgatccatgcgatacacgtgatccagatatatcatcgcctgagatttgaggcatcagccccgtgacccatctcgcttaagggcttagggctacccgcacaacggaatccaatccatcccgaaagagactttgtgtgagcgagcttcgacaacccactcccgacaagtcaactgtacgctatctacccccccctttcacccacagaccaatacctaaccatccacagaacaaaccgtcaaaatggtcaagaagagggcgaacaagtaagaccaacaaatccccccatctcggcgaaacagtatcccattcgacatctccgcaatgacgccgacggaagcgcacacgacatacatctctaaatacatcgaaaatcgcgacctacgcacattgccggacaagaagaatgggagactggatctcgattgattcgcaacctcaggggcacggtaactaattgatttgatagcggccgcaacaagaatggccgcggccacgttaagcctgtgcgttgctccaactgcgctcgctgcacccccaaggacaaggccatcaagcgcttcaccatccgcaacatggttgagtctgctgccattcgtacgtgacaactctctcgatacctcgaatatacgacaagatctcaagatctatggctacaaaccattcgaggactttcagatgtagcagtgcaactaaccgttctcgctttacaggtgatatctccgaggcttccgtcttcgccgagtacgctgtccccaagatgtacttgaagctccagtactgtgtgtcctgcgccattcacggcaagattgtccggtacgtttccaccgattgccctcctcgatacctagtcgcattccacgtactaattactcgttcatagtgttcgctcccgcgaaggccgccgcaaccgtgctccccctccccgtattcgcttcaacaaggacggcaagaagctccagccccctactgccgccaaggctttgtaaggagatgaatgtcgcacgacaaacaaaataaaatggaactagtttgaaatgaattcttttattttgtcttcactcttcgcattggtgttcttctcaaccggatcgcaggggtgatgctcggtcccaaaactgccggccatgcttctacactgaggatgaaaaagacggcaccaattgtgcgacgaaggcaagttggatgtctctttagcattgtgacgtttatgagcccgtttacgacggcttgttatgactgggaggaaggatggttcaagtccaagggaggactcagaaaatatcaaaaattcctacaaaacatgatcgcgtgacgtagacatcaattatcttgagtagctatgtagtattgctgggtatctgccaagtacgaaatttatgggtacaggtaccctttctcaaaatagtttccatacatatctaccgttccggtccgcaccttcggcattgggccccgcacgaccttcacctctcccttccaatggccttcgacataatgggagagagcaatatggggtgatgatggcatgagtaggctactcatgccggaagcacccgtgccaaccgtgtttcgccgccctctctcacgtcgaatcacctgctcatactcagcctttttgcggcgacgaaaggtcgcaagctctgctacaaggtcaatcatcgggacctggcactgttgctttctatctctagtagctcctgttggaccaggggtctcagcactttgtggatggtgacgcccgagtcgagaagaatcaggtgattgcaacgaagaagaatcgggtgaatacaacgaggcactctccgacggcataagcgagaccttttcgttaagcacagccatgggaaagtattttccagggtcattttcggggactccacactcttcttcaccgaagaagctgaaatcatcggcggctgcagaccaaagattctccgagtcgcggtcaccagtgcttgaatgccctgtggcattatattggttcccgggtttccatgatgtcagcttggaggtatcaacaggtttaatttcaagaactagacgccgcaagccaaagagagatcgcgagcgccgctgctcggcttgcatgcgtgcttgccctggtgggagggagtagtctgatcctgcttgtagagttgctagtaatgcttcgtttgagcaggcagtaatgaaccgagtgagcgcagaaagtattgaagagttaggcgtcacatgtgatggtacatctgtcagcaccaaagattccatgtgaggaatatgtgatgggtgtaggtaagggaaccagctttctcttcctccttgaagtgggattgattggttacgtggtcgctttgccaacaattcctgtactgttcgtgcgagagaatcgttcggcgagattggggagctgcattgcatggttgcctggagagagaagtctgccgcaagcttgtcgcagtctgaagccattgaaatggatggcaaggtgcttccctcggcctggtctgtatcccatgtatctgtcctagcactgaagaccgtaccttcgttggcgctactgtgtatagggattggctgtacgacctccggagcaaaagctgatccacgcctaaccgacgggccaggctcgtcctcataggatttcaatgcctgggatgctttcaacccttctgtcatggaagatgagctaattgagttggtcgttgatgtatctgcaagttcaaagacaggtcttgtctcttcgggcaactcataaacctgctgggaggtatccagctcaaattgttcgacttcgcgggggcaatcttgtgctgaaagctctggaagaaacttatcattggatgaagcgtctttagtttgtgattggcctgtgagaacagcatgatgcgctcggaaatatatcaaattgtctcctgcaatcttacccaaaattgggactagcttttcggctcccgaatatttctccttccgataatgatgcgtgtgatgtgccttatccggtggttttagggtcccgaaatcgagagcatatagtcgggacgagaataaaagattcgccacagcttccagagatatttgattgccagtaatataaagatgtgtgattcccgtatgcggcaagtcttcaacccatggatgaaataaaacgggctgagcgagaagcttcgcaaactggtcatccaagtccggccgcttgaagaaatccgagccagactcattgattgcaaagtgcgagaagggatctggagaagccgtggcctgccttggactctcttgcatttctcttccgtctggcgggagaaaggatgactgtagcaggaatcgaattgccatgtcagtgagcatgttgtctctcaaatccaaacaacggactcgttgtccaatcgtattggctagaaattcggcgtcatcatctttcagcccaataccacgcaatttgagtatccggagaaacggcatctgagctagcgtagacagtacattgcggtctcgtgctggggtggtgtacgaaagatccaggtaggtcaatgctggaaacaagaggagagtatttgcgagacttgtggaagtggcattcggctcacgttcagccaacaagagccttatattgtactggttggacatttcatggggtttcaatgctgtcatggcatggtggtcaaagaatggtaacttcgagaccatcagacactgaagacatggcagacattcgagaatgtccctcaaccagcccggtcgcggaccaccatatatctccgagagagcgggtggaagatgaagggtatgggttaacgctcgcacctcttgtcgggcatatttgagtgttcttcggaatcgcgtgagagccactgtatgatccagtcaggtattgctttttgagcaatcgctgttgttcataagtttacttaccatagactgcatcattatctgtaccaaagtgagatgcaggattaccccagaggaagggcataaatagaccatgccatctgtggcagactaaagatgcagcgcataggtcgctggaagggatatagcgagcaataattgtccaagcatctctgtctgttgctgattcgtaagaaggaggaatgatatccatcgttgtattattttttccttctttcgatcaaaggcattgtgagttatacgaaaggtggtggaaatgcgagagggagtttggccccatgagtacctaggtagttgcccgactcagccacatagttagttagttctacgacagccttttgggatataccactggactcaggactccgaatattcttcataatgtttatgctttccccccctctcgcttctggctatctataagtatcatggccctttatccacgactatggatatatgacgtcactaaataaagcaactatgaacaggcgggggatagccggtctttgccctaatcctcacttattcctctgccacgcgcagagcccacagtgcttgggagagacttgaagcatattctacgtagttttgccggtccctactctcaacaaagggtagttagcatttcatccattgtcgcttagcatcacgcccgaaaaatcaggcataaataccccagagccgggatggtagcttactaagcatgaaactgagtcagcaagtgaccacgacttctcgacttgcgttgcggccattccggactcgagaatactcacgcggtcctcgaagtgcgatcgagggcttctagaagcagtccagaatatgtcagtgaacagaccccttgttgattccacttccttgtagccgaggcttccttgttacttgttattcttgtactcacctatgcaaagatactttggaatagaatgtatcccactaacatgtcaaatagtcgtgtgattagcaacctcccccagaggttcaccttaccatgtctgaagttcatggagattcagagctcgttccatcgggccctgatctagattatccgcttgctttggctccgcgacaagtaactttgcgagatcgggttaccgttgcgaccctgatcccttttacttcagcagaggaagtaccgcgggctctaatgaagtatctctctgaccaattcaacaaagagattgaaaagggagatacatatgctatgaccgagcccatcccattagctcagttcggacgatattggttttcgaactttggtgtggtcatgcttattggcgacatcgagagtgcagagcagacacatgcgatggaccgtgctggagcgaactggaccaagatctgtctaggtggttttcatattcgacctaattaccccggccgtagtagtcatgtctgcaatggcactttcatcgtcaccgatgctgctcgaaacaagggcgtgggtagactgatgggcgaatcctatctggagtggtcacctcgactggtgagttattcaccacgatcgcttcaaaagggctatgaattaatattttctagggatatacatatgcggtcttcaacttggtatatgagtccaacgttgcgtcatgtcgcctgtgggattcccttggctttaaacggattggccgagtccccggtggaggcagtatcaaatcacaacctggggagtacgtcgatgcgatcatatacggtagaggcctcagcttggatggcgaggattctgtgtctcaggatcgttttgagaaaattcggtattatttgaagcacgggaagtaccctcgtggtgctgaccgggccgaaaagagtcgccttcgcagtgcggcgactcattataaacttcttggtggtgaggatggggagcccgagaaactgatgctgaaggataaggaggttgtgtcagacccgcagcagcagtacgatatcgcccaagaagttcacctcaagcatcatgctggaatcaacaaaaccacagcagctattgcgatcaaataccattgggtacgaatcaaagaaaccgtcaatcgcgtgattcgagactgtccacaatgcaaagagactctcaaggtgccccccataccagggaccaaagatgatgataaatcgccatcggaaacgatgtctggcatggatatggatagcacaatggagcagcccccgaaggacccaatcaatgtcccgcaggagatggacgaagcacctgatgagcctcccaattacaaccctcttatgcaccaacccattcctgcagctatgcccgatacagtccactccatggctgggttcgcacccatgcctctcgatcctcaaatcatgcaactacatcaacagttacgacgctaccaacaacataactctatgacgggacagttcgccccaaacccacacaatctcagcatgtcaagctttgacgacgctatgcgctaccatacagccagcaatgcatatcaaatgatggtagatgacggctcggatccctttagacaagatgtgcttggacttgtaaacccaccctcacacgagttacagcatgatgctgaattactcgccaagttcgagtatggaagtccttcagacggaaattatgactttacgtgaacacgcctcaacttttatctcggtttctcattccgagggagttattgcatttcgggtttgctttgtcttaacttaaatttttctacctctctcctctattgttctattgtcgaccttcgaagccatccgtctgagataccgctaacactctaccattgtgccgtggacagtgaagcgcgctctctgctacggtatgctttttattgggcatattattcaaaagattatctctatccatattttaaaaactccatattcaatccatagatgtaaattctgtacatctcttcaaatgcgtagggtcgaggagccttgattggtcaccgccttgcgcgactgggggggcttttggggaacagaagctctgggaaattttggcagatcaacccctccgacctttcaactcatcataccccttttcttatttcatttatttttttattgaacggtttcgtgtcctaataccgatttaatcatggccttcaacggccaaacccccacgattgtcgtgttgaaagagggtacgtgctgtttccagtgcgggcagttttgttggtgggattctgtaacctatgctaactactgttcctatacaatctacaggcaccgatgcttctcagggaaagggtcagattatctccaatatcaacgcttgtgtcgcagtgcaaggaacagtcaagagcactctcggtccttatggtggtgatctcctgcttgtggatgccaatggcaaacagaccattacaaacgatggagccacagtgatgaaggtgtgtcttgctattgatgcaactatgtgatcggaggaagttggcgattctgacttgcgtgtattcggtagcttttggatattgtgcatcccgccgcccgcattctcacggatatcgctcggtcccaggatgccgaagtcggtgacggaacaacctccgtggttgtcctagccggtgagattctgaaggaggtgcgagacctcgttgagcagggtgtcagctcgcagaccatcattaagggtctgcggagatcgagcgccatggcagtcaacaagattaaggagattgcagtggacatgatggatgcttcagagagccacgaaaagaaggtcgagacactaagacggttagccgcaacagccatgaacagcaagcttatcaagcggaattcggagttcttcacaaagagtaaggcttccctaccctgtggttgcaggtttggccccgaggctgacgagatggtatcatagtggttgtggatgcagtactttcgctggaccaggatgaccttaacgagaggttgatcggtgtcaagaaggttaccggtggtggtctccaggattcgcttttcgtcgacggtgtcgccttcaagaagactttctcctacgccggtttcgagcaacagcccaaacacttcgagaaccccggtattgtgtgcttgaacgtcgagcttgagcttaagagtgagaaggacaatgcggaagtccgtgtcgagcaggtctcggaataccaggccatcgtcgatgctgaatggcagatcatcttcaacaagcttgaggctatctacaagacaggagcgaaggtcgtgcttagcaagctgcctattggcgatcttgccacacagtacgtgcttgctattcactatgaggcatgtgcctagacactaatgatttaatttgcaggtacttcgcggaccgagacatcttctgtgctggccgtgtggcctcggacgacttggaccgtgtttgccaagctaccggtgccgcaacccaatctacctgcactgacatccaggagcgccacctgggtacctgtggcgcgttcgaggagcgccagattggtggagagcgtttcaacttgttctccgactgccctcgcgctaagacctgcactctcgtgctgcgtggtggcgctgagcaatttattgcggaggtggaacgtagtctgcacgatgctatcatgatcgtcaagcgtgctctgcgtaacacaaccatcgttgctggcggtggtgctactgaaatggagttgtcgagctacatgcacgggtttgccgaccgtaacgtcccgcacaagcaacaggccgtcgtcaaggcattcgccaaggctctggaggttattccccgccagttgtgtgataacgctggcttcgacgctacagatatcctgaaccgcttgcgtgtggagcaccgcaagggtaacacctgggctggtgtcgacttcgacaacgagggcgtccgtgacaatatgctggcctttgtttgggagcccagcctggtcaaggtcaatgctatccaggccgcagtggaggcctcttgcttgatcctgagtgtggatgagacgataagtaagttccttctctttgctttccatcctcggaatcaccactaacctatgttttctttccaacagagaatgaggaatcagctcaacctggtcaacagcgcggtatgccgccaggtgctgcccagcgcgccctccggggccgtggccgcggcatgcctcgacgaggataaacgagtttgaccaaaattggatgatgctcgatgatattccccccaaaaaaagaaggacgtctgcatgattgagggccacaagcagttgaagcgaactctgcccaaagccggtgtttgtgagatgaatattgaatatgaagtacagggagaatagaagacgagttgctagagatgacccgagtgaaccacacagtctttccaggtacatgcaatataaacatagtcctcatgaaagtatttcctcagacttgatcaattgcaggtgatatatcagatacactttcttaaagccgagctggtccgcgctacgacggggtcttatacggatcctaataatatctacggagtagtccgtacgctgtaccccgtgctattccgtattttatttagaatctctgtctaggtagctatattccaaacacttccacccgttttacatcccattggcccattttcggcgccaagacagtgctattgaatctccttcagctgtatgacgcgcagaaaggggatctatttggtataaccatcgtgtgtgggatctagttagttagctagttatgtgtgtgctttgctaccactccgtagatactgttacaaaatgatccgaacaagtacaaaccttcaataaagtaagtgaggcccaatgaccgagggtcttgggcttccaggggttgatcggagctgccgatgaacccatgtcagatataaaagttagttcggattatgtcgtgttgatttgttgatttttttttcttcttttcttttctgttttcccctccttttctctgttttctgtttcttttttggttgtcttagtgtctagtgcctatccgaaacagccttataaggaaatagtggacgccgaacctctttgtaagtggcgagtttctagacgatccccgccaaattatctctggactctacaaatccccgaactgttcggacgctttctacttgatctcattctttgcatattttacattttccttttcagaatttatcttgctctcttcaaggcttggcttggcagctgccgtactcccgatctgttctgccttggatcttctcttctccacattcaacatcgcgttctctcctctacatctttacatttcgcttgattccctaggtggacttggggatttctctgatgtcttactatccaccgtactcgggcgcgccgggataccccccgcagcagccgtcatatcccccgcaacagcagtacccgtacgtttatccctttgctctattgagaacctacccgtctgacaaggatttgattgcagacagatgaatcagcagcagccctcttatggcggctatcccggccagtcctaccaccagcagcatcagccgccgccgcagcagcaatccaacccgtatggttacagccattcgccccagccatcccagtcctacggcgcgcctcctcctcagcaaggctacaatgtatgttatgatgagttttgccttgaatatacacgagattgacatgtatcaatcctccccaggctccgccgtctgggtacaaccagcacgccaaccagcaccctgggcaatcaatccaaggaagaccaggtatgcctaccatttcccagcttgaaaccacatcgctagcagtgaaagctaatcaggcggaaattaagcctacggtcaggccggcggtccgcttccccctcccagcaaccccgtcgccttcggtcacggcgctccccaaggctatagcttccaatactcccgctgtacaggaaagagaaaggccttgttgattggtatcaattatttcggccagaaaggtcaactgcgcggctgtatcaacgacgtcaagaacatgtcgacctacttgaaccaaaacttcggctatgctcgcgaggacatggtgctcctgactgatgaccagcaaaatccgatgagccagccgaccaaggcaaacatacttcgggctatgcactggctggtgaaggatgcgcgtcccaatgactcgttgttcttccactactctggtgagtaaaatgcctccatcgctgctatagcggtgaactaataagaactcaggtcatggcggtcagacacccgacttggatggcgatgaagaagatgggtacgatgaagttatctacccggtggacttccgggttgcaggccacatcgttgatgatgagatgcaccgtatcatggtgcagactctacaaccgggagtccggcttacagcgatcttcgactcctgccactctggctccgctctcgatcttccctacgtctactccacctctggtgtgctcaaggagcccaacttggccaaggaggctggacaaggcctgcttggtgtggtgtcggcatacgcacgtggtgacatgggcagcatggtgtccaccgccatgggcttcataaagaaggccaccaagggtgacgaagtgtatgaacgcaacaagcagacaaagactagccccgcggatgtcatcatgtggtccggcagcaaggacgaccagaccagtcaggatgcccagattgccgggcaggctactggtgccatgtcatgggctttcatcgcggcgcttcggaagaaccctcagcagagttatgtccagcttttgaacagcattcgtgacgagcttgcgaccaaatattcccagaagccacagctaagctgcagccaccctttaggtacgagtctcggattacttgaccgcaatcaattctgacctcccctacagatacggacatcctttatgtgatgtaaatggacttggaaatgaagataagggacgatgcttgtctggctttcaatgaagcatgctttcgtgtttaatgaattgccatgtatgtaattccaccatcggtgttccagtgaatattttgcctgtgggtggcgcactatttgtgattaatccttatgagtccttcttatgcgttgaaaatggagtgcagattagctaagcgtcggtctggaatcatcgtagacaactgccctgggcatctgcacaccaacacatatactctcactacgggaaactgcagttagcttcgttatctcgagaagatcaaggctccaagctctcatcaactatgtagacatgttcaactcgatatgatgggatccatcattggcggaagagctgaccgagtgatatggatggtggcgctgtacggattttataccctcaggggaccgtcatatgtcaattttgccccctaggagcccccacggaaattcatgcccccaactgatcttaatattcaatataacaagggcggataccagaaacgcaggacccgaatcaagcacaatgcagtcaattcgccagcaccgcgttctgcgcaggaagctccaacaacaatttgttacaaagcatgagaagcccgacaatgtctggactcacgagggccgctacgagtaccgcggaggagagatccacacagaacctggcgagccgaatgatgacccggctgccggacgaaggagggagcatggccatcgcacttttatatctgggccatccctcaatcctcgccattcagtccgatcacatatagagcgagaaggggatatcgagggctcggagtacgacccggtactctcaaccgatccccataccatcaatacacaagagacgctgggaaatacgcctgatattatggtgactggcgttgaaagaccccggccgtgtgacagtacgggcagtgagactgatatcgagtcattgaaaaagaacgaactcattatcgtcacatttgaaggcgagtgtgacataatggatcctcacaactggtcatttaaatgtcgactgtttacgactattctcacttcacttactggatgtgtggtcttctggtcatccacgatcgattccactgctctcatgacaaccaagcaattgtatcatactacctttgaggtcgagactttgcctactggtacgtggttaacactttgaatcgtttcaactagactaactgagatcatctagctatgtttctgattggttgtggagtaggcgcattgataacagcacctatatcagaactcttcggacgcaaccccgtgtacattcccaccatcatcgggttcattttgttcaacatgggcgcagggctttccgaaacagtggtgcagcgagtcgtctgccgcggtctagctggactcttcgggtctgccccggcgattgtatcagcagcatccctggtggatgtctggtcacgcattgaacgagtctacaccttcccgatctttgcgatattcatcttcacgggtccattggtggcaccaacaccaggagcattcgctgtcagttctgacgcggtaagctggcgctgggtagactggatgactataatcttcgcaggagtcctcctgatcccggttgtgctcttcttgcccgagacatacagcccgaacctgctgtactggaaagcaaaagagctccgccgcctgacaggcgacgaccgttaccggtctcccatagagttcagaaaatccacgttcacccaacgcatgtctacctcgttataccggccacttcagcttcttgcaacagaaccaattatcatgatccactcaatctacgtcgccctcctcttcatgatactgtacaccttcattgcgggctttgtctccatctatgagatgacaagcggcttcagcccggccgctaccgacgtcgcattcctggccattgaggtcggggtccttctttctgtactggcagtccccatttcaatgtggctggtccgtagagacatataccacagccgtgcgaatggcgaacagcgcccggaccccgagattagtctgtacatgggcatgttcggtgcgcctgctgtcccaatatcgctattctggatgggctggacggccagacatggagtctcgtactggagcccgctcgtcgcttcgggattctttggatttgggtcgttgtgtatcttcgtctcggcgtaccagtacgtcgctgattcgtacgagtcgtattctgcaagtgcgcttgcctcccttcagatgctgaggctcgtcgctgctggcgctatggctatagtcgcggagattatgtataaggagcttggcattgaatggacgttgactctctggggtggagtttcgttgttgtttttgcctgtgccttacttgctctactggaaggggtataaaatccgtgcacagagtcgctatgcgcgcagaagtgaacggagttgaggaatgtgtacatggaagccctggagataggggggattttaagttgctataaatcaggataattcagtactactgtcattactaatagtagccaatgactagttaactacatggttatacctacaaaatgactccgatttgccagtctcctagacagtacaatcctcagtatcatcgtggccctataatatcgttaatgactagtcataacgagtagtatacggtaccactcacacaatgcatattaatatgctttctgattgccgatgctgaaggcctatagaccttcctaccgttaagtatattctccccctagccataacaattagtaccagcggttatattgagaaagaggtcgaaagcgcacggtgtgtaagcgcaaacatgataatgaacgtcctagccagtgggatctctctggcagtgatcgcgtcagttatgtgacgaaccgtgttgggcctcccgtagagtagggttcgactctagcttctcggggtttccgttcgcagtccgtgatggtcacacttcttcccgccagctgtcgtgtcacttcgattgaatataactccaccatccacagcttctttcgggtttccacgtgcttcgctcccgacctgtcggaagtaggtagggagcggagcgcctagttaataccgttaccaggctgaggaagaagtcctcgggcgggaagccggttggcttgaggactatccacttcccatccgtaaatctctggagaaccctatcgctgggtgttccccctttcgaagcctgcttcgcccgtttcgttggtaggggttttgctccggagtgggacgaggcgatgctgggcataggtgacatcgtacttggaagcaagccagatcgttgtcggttctcaaggcatcgttgtgctaggagactccgggctgttctcacgggaatttgagttggacatggtagctgtaaagtagagcggttaggcatatgctagtcttataggctggttaaatacgcaccaggtaaaaaccgactcaagttagatgaggaacaaaccactcgccagagaatgaactcctcgtcacaagtcttgaccctggttttgtcggctatatcacagagcccgtccactaagcaaccatcatcaagattcccgcgaggccaatcgcattgcttttgctgttgttctatgatcatgttcggctgtggtcttgggtactatacaacctgccatctggtgcatcctctatatagcgcatcccaaatcggacctcgtccttgtagatataggtatatggtggtgcatgagatctatatatgtctatatagcccgggtggcacagttggcaaggactcagacctctcctagcgttggcgagagttgaaagtgcaccaggagaagggaacatggaagactggtgtttgttcctagcttgagaattgacaataagaaagtaggcgatggattaaattttttgtgaataatctcagatagggaagagctctgtaatataactttgataggaggatgatggcttggataaagggcctttgtttagatttctcgcgtcagcatatctgtgcaaatgccctggttgttttctttctctgcatcaaccctaatcttatatgaatgaacggataaagaaaattggggtttgattctattatatgaacaaaagagaaatgcagcaaattcatctcatttgtgggtgcactaacgctggctcatcgtaaattgggcgccgaaaatggctgtcggcggctggttcaaggccaaagtctgagatttataccttgtccaagatacaccgagggaaaagactaaaacgactttcatttaaggtgcgggaggttaaaggacggacgaatagaataacgtgttaataatagcttagtccactttccgccccacccagtctatacaattgtataaaatgcaaaaggcaggtgggtgaaggagtgaatttgtatgcgttgggagatgacggtgttggctccttggagcatttataatacattaataaagtattattagataatgttaagacgttattaagacgttattgaagctttaagaatgaattgtgttatagctactcacatcgacccaccctttagagcacctatgaactgttatacctggcatcttcagccatcgtgatcgacatttcaattgaaattgaggtcggtctttcggctggaagtgcgattggaagtgcgattggaattcgtgaccgaggggaaggttgaggccggggcccgatcagggaccaaagcaaaaggataattgtaccaagctagatatttcgacgattagatacgtatttgcaaagtcacaattttacctcgaactttctcttgttcaatataactgatccgaccgataattccatcggccacttgcaaatcttcactgtggcaggtaacatgcttcttcaagtttccagtcaggaaagggtgctaagaacagtaagctaagcatcgctccgtaggtgataatctagaagcaagcatgtgttacgcatttagggtctggctctctcacattgctgaccctgcaccctggataacgacaatattgcgcgccaacttggataatcacacggtcatcctcatcctatgttgtatatcatattggtcagcctcttgtatacttcctctagataatcactcatcaagtatcacttgaatgcagttacctaccctttcatatttcggcatcacaagttccccagaagcaacttcacgaacgtaacggagataagcaggatgcttagctagaaatgttggacaggcattaaccatggtgtaatatgactgaggttaggagccaaagaaagcaagggaaatttctttaaaggttgcgagaatttgatggggtagaccaaaatgccgcttgcctaaaaacctgtggatctacaatggtctataagatagggtcacgtgcatgtatcaaaccagtcgcgcttcgactccaaccacgcgttcaacctcaacattcgatgtctgattttgggaaaacaccggccttcgccgtaatctaatccatggaaactgctagaaatctacactgcaatttatcactgaatccatgctagttctggccatggttccgttccgtgatgtccatcatccttgaagacgatcacccccctgcggtgctccgtttcggtcccacatggtaccatgagattccttttttaccctatggattggagacaaccaatgatcaaggatctggatcacttaaacatgcagcaatgaaagctctgctacgggaccagtcggcgctgaagcctgagctgtttgaatacgttcactggtatttggcaaaatacctgtgggatgctctcaaaaagtagtaagtcatcattggagagttttttaaactacttccgcagattcttgagtctgcttgttcagatctgacgatctacgcagcaacaagcagacaatgcacatgtggaaaataatggccagcaattatcctgtacaattttatgagattagtccttactactgcctcaatgctggctgtcccaaaaagccactgagagactacatgggtattctcaatagcgatgaccttcgctggcgtgcaatcctgacgattgcaaccacgtactgtaccgcctcagacttcaccactataccaaatatcaagaatttggttgctctggacatttaccgtgagaaatatgcgtcgaattcccccccgctggatccagtgggcgttagcaacgacttgcaagatggatttgtgcgtggttggattgagtccgaagcactgcagcacctccgaattctcaggctctaccatcaatgtgaaataaccgttgcggcagtgggagctctacgtgagctaccggagctccaacttattgtggcgtacgagtgtaagaatatcacagagacgattcaaaaatacgataggcccgcgaataacatcattcccataaagggatggtcggcctgcagactcgattggtattgggaaactcacggaacgtcaaaaaccatcgacgataatctcttggccttgtttcatgtgtaccaggctagtctccagacacccggagacgagcattcgaaaagaccatcatccttaccaacgaatctcccgattttggaattcaaactaccaactgtggaccacagcagaagagacaagattgttgtccgctctcgctataatgccaagtcaatcgtattgttcactcgagatcctgtgaagcaaaagtttgatatcgagaagcgacgtgcaagagacaagaagaggactgaaccacccgaagggggagatcgtcctgccaagcgagcagtcatgaaagagcggggaccgatggacatttccaagactttaacccagttcttctgatggattgtctacgtaaataggcagagaacatgggttgaatcgcgcagtggaataacacctctgcgtcattttgaagcgatactccaacattatttcgaattttgtcatttggttagcggccataaagcatactacactgaccacagacatgttaaaaactagatgtggctggttcgtgggacttgctcatttcaatctgtatttcatgatgtcctatttaggttatgatatagtctgtttccaaggttcgaaagtgttgtaccttggaaggccaccccacatcacatgaggcgtatgtgagtcagtgctctacagacaatcgaataccctgatcgaattcattgctgcagcgtatggctttgctttgctttgcactcgctgaattttacggtctgcgctagaggaggctgtaaacagcatcttccaaggtcttcatgcgttgattatgccatatgttataatagatctttgtattctgaatggcccgtttagtcaccagtttattctgcatccgagtcaagatctggctcaataacagggaatgtcaaaagcgcagcgatgccacccagcccctcgagacgctttccgctttcatgatctgaactgagaattcgcacatcaccaccctctacatcgcggacgcggtccacaagcgccacccaacgtttacgctcagcgatatcctgtgatcggaacaagcgattcgaaacaatgagcacgccgccacctcggccgacagcaccttgttcaacagcgtagtcaacctcacgggggccataggtcgctttgttggtctccttgcgcagttgttctaggaagtcgtccatcaattttgtttcacgggcatacttcgtatcagccagcagactcttaacggcgggtgactggagaacctccgataaggaattcgtgtaccccgatgtggagtgcacaaccacaagactaggaaggagtcgcttgagcccaggagtcgttgttgatgcctcggattggatgtatttttggaagccagcggcgacgaacccgggggatgcgaggagcacgggccgtacagcttcgttgttggcgcctgaagtaagactggtattgaactccatttgtcgaagaagggtctcgagtgtaactttaaagaacttgttcattccctggcagtatgcgtcgttaatttcgagcccagacaatgacatgacagcagaaactcactttatcatgatcccctcctccctgccgtttccgcggcacagacatctcgatcttttgcttcaatattgtctggaattggccaataaagcagatatgagccagtccttcctgcatcactaccgcgacagcctctgcacggcgtttcccgccctcatccacagcgtccttgagtgactcaattgcaatactgtcccacccgacaccctctccatctgcgccaacctctttctctaacgtaaagttgcgattcaactctagatcgagggtatggaattgtccgattttcgtgtgcggtgtttcgttgataatttgtcctgatacatggagctgagagctctgcgggtcgaagtcgagattcttcacgcgaattacaaggttgagatgaacgcgcgccgagctcgtggacccggtatcctgaactgtggtaactcgacgaattgcgctggcgcgaaggatatcgcctggtcggatcaggttgtaggcgtgccactagatatagcgaattgtatatcagatgactgcggggtgctgagactgaaaatgagggattcaataccatgtcttctggctcatctgggcacaatgtcaccgttccagagccattgtgctcaattttgttcttgatgcaacgcatttttgcggtgatactgcacggttataggctgagggcttgggatggtaaatggcgtgttgttattgcgatgtcgtcatatgttgcctgaagatgcgcagattggagggataacagggttgtatgaaaatgggtcaaatcgtcgagcgctttagaatgctcctgtaaacatggatatatcgaacaaatcaacctaatatgagggcattgccgatgttgaacttgccaaactcaccccactatagaataatgccgtccattaccgcccggtcatcctccaagaatcccacctgttctgcagacgcactcattctgggcgattattttggattttcaatgggccatcagagaataaggaattgcggaatattctaatcctccagcgcatatattaaatcaccctgcgctgccagagtcacgagtcatgccttatcgataaagcctaaccctaatcagatcagattggggcatggaaagttgacgtcaaagcttgcagatgttattattggcagttccatgtggaatatgtaataacctcaatatgtaagccgtcaattactcatctgagccccacgtagcattcgtcagccattgatatagccgcatctagtccccttcatcgtccatccccacttcgatggcgtcaaagctccaagaaacgggcggaaatgactgagccgaggtggtccgtggatatcgaaacctttatctatcaagctaatcccctcatttgccttcttttacctttcaactatcaattcgcacatcatggctcccatttcgctgcagtctacctataagttggtctcgggttacgagatccccgtcgttgggttcggagtgagtatattggccccttagagttctgatatgtatgactgacacttatctacaaattaggtttaccaaacgtatgattatcgctgtataaaacccccgcgacagattatattgacttattcttgaatagtccctccgatgtcactgagaaggtgacccgcaaggccattgaaatcggataccgccatgtaagcaactgcaggacccatgcggcaatcgcttccagatttgaccatcctattacaggtcgactgcgccaaagtctacggaaacgaactagaaagtgcagccgctatccgcgggtctggagttgatcgctctaagatcttctatactagcaaggtgccctcgaaatgcatgggatacgagaaggccaagaaggccatcgaggaaagcatcgccgcggcaaaccttggttacattgacctgtatggatctccttgttctcctgaaataaaacatattagcgaactaacactgtgatattagtatgctggttcacgcgccctatggtggcaaggaagaccgccttggcacatggcgcgcacttgtggaggcccaaaaggcaggccacgtccgttcgttgggtgtgtccaactttgctatccagcacctcgaggagttggaagagtacatcaagagcggagcgggcggacaaatcaccgtcggccagtacgagatccacccatggtgcccacgcgaggatattgcggagtggctgcagaagcgcaacatcattgtcgaggcatactctcccctcgtgcaagcgactcgcatgaaggagccagttctgcagaacctggccaagaagcacggtaagagcgaggctcagattttggtccgctggagtctgcaaaagggatacgtgcccttgcctaagtcagtgaccgagtctcgcattctggagaactcgcaggtcttcgacttcacgctatcggatgaggacatggccagtctgaagctcaactcgtacgcgcctgtgtgctgggatcccgtccgtgactgcaaaatctagatgacgtcactaaaataatcaaaagcctagcgtatggattggattagggaatcaaattctaagcatctcaaaacacactgaatatagatcaaaatatatagttagatcattgaaaaggtgcagcccaattaggtaatttgttgacttacgcgaccggcacaacgtatcaccgccgcgaaccaaaaacagcatcgacactcccaacgcgttcgggtaagattcaccacagctctctatccccatgatagtacacgcaggaggcagtcgctgccacggttgccctcactatgccggataaaccgcgtcgcgtcatattggagacatccaaagaagttaaacgccggtggcagcgcagcaaccaacgattccagttcaccgcatcccagatcgcacagctagatcgccgggaggagcgagaaaagaaagcgaagaagctacgcgagaaggaaaagaaacgcattgccaacaagaaacggaaagccgagcaggaggcgcaggcccgtgaggagcggaagcgtcgcggcatcccggatcccaatgcccgcgtctcctcgagtcagcctatgctatcaatgttcctaggggctgggaagcgacaatcacctgctgcaccggagcctgcgcctacagttacggagctcgaagcacatgatgacaattcggggagcgcgggtggagatacggaagctgaatcagatgacttggatgaagtattggaaaatgaactatctaagcttcaagatgcagatgtcccgaaagagcctgaaggccaggatatcgcaaccgagacccgggcttcatccttggaagaagatgagttctcggactgctcggcgttcgacgacgaagagattttgaaaaaagccgacacggctgctattacacgagcaactgacgaagaaacgaagagcccccctatacccaaggaatcatcctacatacgaccttccccggctgtactcacgctaaaatcatctttcgactctttccagtacgaccccgccgatttccttgaagccgaggcggctattatcacacaaacgaaaagtcctggaacgagagaccattccccacccaaggacacctcctctttacaacctcctttgtctgatcgaccgtgctgtagacccaccttggcgtcttcttttggagattcctttcgagacgagactgcggattggattgaagaagtgtttgcacgcggaagcggtgacccttttgacgaactcaataaagaagcctctgcatgattttacttgtacttggtaattcgctacattttgtctcgggtcttgcagctttggagtacctacaatgtatggcgtacatttccctgaagtcttggcattatggagatcgggtccggtccgacagtcgggtgatatccgcgcagttcggatacatcacaaggcccttcggttcgggagactcgaatattttggattagaagagatgaattgttccgtcgggatgaccagaaacagtctagaggattcagaacattgtgtacatttgtcttattattgtagtcagaatcttaccgggaatgacgttacatacctatcattctatagatccccagggctgcccgcttctttattcctttattccttcattactttatttcttcatctctgatcttggatcgatcccattcccaccggactcctaatccacaatgccgttcgtccaagcaaacagccatcgtctctactatgccgactctcaccccgccggccctcccaaaaacggcctaacttttatcttcatccacggcctgggttcctcacaaaactactactacccagtaatcccgcaccttacgaagctccaccgctgcatcacactcgacacatacggcgccgcccgctccccgtacaccaatgacacaatcacgatccccagtatcgcagaagatgtcatcggcgcgctggactcgctgcatatcgccaaggccgtcgtagtcggccattcaatgggcgggctcgtagtactagagctaggtgcgcggatccccaatcgcgtactgggcgttgtcgccattgggccgacgcacccgtcagatatgttggtgggggtcatgaatagaagatcggatactgtgcttgagtgtaagtttttcccattcgaagcctgccgtgttgttttatttcatcatgtactaaattgtctgcagctggaatggagccaatggcagataccatcccgtctggagctgtcggctcgcgcagcaccccgcttcagaaggctttcatccgggagttggtcctaggccaggacccgaaaggctatgccgcgatgtgccgcgctattgctgccgcgaagccacctaactatgctgcggtcaaggagcctttcctgcttattgcgggcgaagaggacaagtctgcttctatggaggggtgccggtacatctttgagcatgtctcgagtgagaagaagtccctcgaggtattgaagggagttgggcactggcattgtattgaggctgctgacgaggtgggtgagttaatcgccaagtttgcggattctgtgaatgcttgaatgcttgaaatagtctctatttagaacggaatgatgaatatgccagtaatcatgtttggctttttggttatcttcaatgctatcccgctatcgtaaagtacatcagaaatcacagaaatgctacttgaatgctgctgctcgctcatgcgccattggtactggtctcgaacttcaccaacttgacatcatattcaagctcagtggcagcttgaggatcgccctcacgcggcacaaagtccacgacaagcgagtccttgacagcaaataccgagtcgttgtcaaggtacttatccttgctgtcgaagatctgcgttgtcaaaggacggtaattatcataggtagcctaggcaagatattagcttctgtctcaacctgatatcgaataccacgccaaacttacaataatgtgaatgtgagcagggcggaaagggtgacgatccatcagctcaagaagcttgccagcaggaccatcgttgggaacggggtacggcgtcggacgcatgcagtagaacgaatatctgccatccgtatccgtcttgaacttgccgcgcaggttgaactcaacctgctcggggtcctgctgctcgtacagcccgttggtggaagcctgccacacctcgaccgtcgcaccgacaagaggctgcttggtctggaagtctacgacgcgaccgtgcatgaacgccatctcggcatcagcaggtttcgtcttgacgatattctcgccgttctcgcggtatggggtatcggcgcggaagaacggacccaggatggccgtggcggtgggtgcatcctgggcttcctcggcgagagtgaaggtgatttcgtcgacgagactgttgtgcaacgaatacatgttagctggtgactttgtttcactctcgaacaacacttcggcttacgattccagtcccagtacatcgcacaccagctgtccctcgttccgcttgtcgtcgctcatctgtcctgcccaattgagcatctgcacgccggccatccactcgtcgacggtgagctcctcctcacgcgcaaagtcgtgcatgtgcctgattagaccggccatgagcttccgcatgcgcggagtggtcttaggacccatcgcgttgatgacattgtccgtgaagttgggatcgaagcggtgcgtcgccattgttgcgcgtaaatgaatatgttttgctatgcgtatgagtgcggcttcaaatacagaaagcaggagagagcggtttaacaaggggagagtatgcgattatcgaaaccccttgagaccgttatataccacacatggtgatccgacgggattcccagtccgtggacctgaccaaatacatgacgcctattcgaggacaaccccgcaaccccacgccaatggcatgattggggtatggagtcgtcggatgtgcataaaagtacggtgtcagtcggtcagggacttcggaagaggttgcacttccgatttccccgcagtcgggtagctgcagagcttggcagggagcttggcgataaattatttagagggttggattttgatgggatgaaatgccaaagattcaatatgaatatcgtacaaatagaatgagttgtagggtgttttatatatcagaaagctacaagcagcttccgaaatcccaacgcaatacgatgtatatataagtgtcatggtatgttacacagctttagccgtcggaattaccgttatagtaagataacacgctgttagaccccagggcctttcggctgggtgaaacctcagccctataatcgaagtggggacaacttgagatggaaaggattccatactgtaatggtagatcattaggaggattatttgtattccccgtggtcgtctgtgtcgagctgaacaagtatatgatactccctacagttggggtggcatatctccatatcacactcatcgccgggccttggggttcctcttcgtaagagtctccggaagttcctgtagagcgcccccgttcgcccagagcttacccaacccgaccttacgctccactaccacatcgaaaaagtccagcgagacgaacttgtccgcctcgcccttttctgcctgcccactcgccacgagaggtatgccctcactaagaatgacgccattctcactgcgccataacggtacccctgcttgaagtgctttgcgcacatcgatataaatcaaaacctgtgcatctcgccgcataccggagatgacgcgcgagtcatcaagcttcggtttaccccccgcagcatcagcgtgaatagcaagcactgattctaaggaaggtccagtagcgaagtgaatgtggttccggcccatacagcgtagtccaccggattgtagaatcaaaggccaagtcgcgtggaacgtgccgtggacgacggtatcgggtagtttcgattgatcggacaaagaaagcggctcgaggaaagaggcagcatctacggccttgatgctgtggccttgggtcgcgcgaattaaaaaattcgacgggtcggtatcttcgacggctaatgcttggtcggtggctgtttgttgcgcttcgctcagtgcagactccaggacggatgttgtagcctggtcttcgcctaggatagcgccggcttcgtgctctgcatcgggggttgtcactagtgttgttgatgcttgggttctggatttggtggctcgcgcggatggaatgtgaagaagggcgaagcgctttttatcggacgagctcacggcatatagaatctcggggaatgtgacttttagcgatttgagcttcctccaattcaactggagtcagatatagtcagtatatcgtaggtcattcaaacaacaaagctgcataccacgtctggcacgctcgcataaccttgtgcgttcattttcagcccctccttctcagcggcatgtcgcagaagcaagctcaatgctttggagacttgaacatcgcgactttggccttgaccatggccacggccccgcttatctttgttgtctttgggatgagccatatttatcgagagattcaaggagttgttaagaataatattgtagtggggcactccaaatgttataagatgcggctctacaagacctcgtgtacctgattatctttgtaaatagtatctttcttctcattaaaataactttcaaggttaaaaacgataattagcggctggaaaaaagcccaaggtgttttggcgagatgtttaagtcagtcgccctctacacagttatttaggcggacttctgatgtcgaaatgacgcacatctattatctacatatcaggctaaatcctctttaatcattcttcttgtcaattgggtatagaatatcgcggaaacacaagctcatgacttagaacggccatgaaaatcatcaccgatcacagatgcagttacactctgctacgggacaaatcttgtgtcgtttgaaccagtcattggcatgacttgcatggaacccatggttacaatggatgcaaaacaccacaaaccgccgcatcacttcagcctcagtgggctcgcgagaacccgcctcggcatctgctgcgctactggcgcgtgacattggatctggcgaacccagccacaaagtgcagatgccgcaacgcggcatatgtcgaccacaccgcggacacacagtcccagacatgactgtaggtgctagagggttcccggcggtgggatgcacagtttcagcacccttggtagtggagacctgggaggaagcgtcgtgctgggtgagcggactcgtgcagtagttacaggtgagactgacttgctgcggcggtggtggcatgagtttgcgaccgtctgcagtcacggcgaaacgacgagagccaacgtcgaatcgggcacgctcgagttggagtttccaggagttcatttgccgccggtaggtctcacgccaggcctcaaactggacaatgtgtttttggttgctaacaagccgcggcacggtatggctcattgctagcacgggagtttggacatcattgaactttccaatataagattggaaaagacccatggccaaatgacccaagccagtgaggacgattccttcaatatcgccttgacgaattgcttggcttgtagcatccttcagatactcagttaattcgtcatctggaagccagcgtagcgcgacctctacgcgatacttcagaggtagtgtggtttccttgataactgcattccagtcgcctttgctcacaagggctaggatcgcccgggcgtatggatccgtgagctccttcgcgatttccgcacaagtatcctcccagtctgtgtcagtgtcccccttggaggcacccgcaatcgccatggctagcaatttatgtgcttgagtggggttgttgcttcgaagcccgaggtaggctagcttgggctcatcttggaagacagccaacgcagcggctttagtatgctggttttcgccagataaagctttcactgactcctctagttcacggtaggattgcgttgcaccacagatacgaaggcagagttggcgatggtcggggtaagccgtgtcacaaccttttgtctcaggaagattcaactgagttaccaagattgccactgtatccgcaaatgttttagcaccatccttcttattactaatacggcgttgttcgagaccattgcctgtgctctcgtcagttttgagaaagacttcaaacttaagcgaagacaaacctaggtcattattccaaacactgctcacacctagataattcaggtccaagccattgacgaccattgacgtcccggaagactcttttcgagcacctaggaaatgtattagatgtttgtttgtgtccccacggaaaaatgaaaaactcacgttcaatccagtcccataagtcttgtagagcttggtcatcagatgccacctttcggttttgatcctcatcaaacaaataaccctctttgcaccggaactggttgattgtgcatagagtgagcgcttcttcggcagtaagagggacccccattaccccgatagccatggcgcgttccctattctcgtggcttgggacaggctcgaaatcaagattctttggcacaaacagttcatcatttgcattttcctcctgctcttgcgaggctgagtagactcgtgatctgatttcttcgatcaggccggatatgggcgcaatgtgttcagaaagtgggtgaatcgatcgcacatctgagtcattcgatgagatcccataggccaatacactccgtgaagatagatcaattggtgcgcacgggggccgcgcggtgatgatctgaggttgtccattgccgtcgagtgcgatagaacttggttgaggggacaagctaatattcagggaatcgaatgaaacaatccggtccttttctctgtagccgcgagtcgggttatcaaagggtatgcatacgtcccgtacgtgcttggtgtatacggattctggataatttctggaagatccctgaccaagagtctcgtctatcgaagagcgatactcttccggcaggtagtctttggaaatgtcgtaattcttgaaatgaccgctgctggacagcgcagcgagactgcctcggttcgtccgcgaaaagcgcaagctccagatggaggatttcggatggaaaacattcttgagttccaaagcaggtgtcgtttgacccgagtctgtggcactggcagaagaaccaattgctggggatgttagtcgggttccaacgcggcggtcccatacgcagatggtgctttcatttgttggaatgcaagacgcaatgtagttctcatcaagccagtcaatagccagattatgtacacatcgagtggggaattgcaatgatggattgccgggtccctctgttacgaaatcagctccaccttcgtgaatgtgaaaccaggaaagacgaacctcttagatcatagatccgaacaaactggcctttgaccccagttacgattgtatcaggctggtcccggaaaaacttgatactggtaataggctctgagctggcgagcttccgtaaaggctcagtaaatcctttacttccgccagcaggactgagtcgttgattcacgtcccaaatgttcaagcaaaagtcgttccgaacgcgatcgaggcccgatgccacaagaccatgtgtactaaacgccacagcattgcagtaccgttggttgcggactggaaatgaaagagattccttggcatccccatcgaggcgtaggatagtagcctccccagacgactggcccacggcgatcaggttctcatttgaagtagaccagtcgaatgcgcgaaaaccgggtacattggtcagagtggagagcacttcatggcgtatatactttccgtcaaacccattcaccctacacagacgaaatgatttccccgtgacgtcgacggacaggaagcgttgttccgtggccgacgaggtcggggaccagcgaatggcagactccatgctggtccttttagcaagcttggttcagatataacctcagtagcatgggtatgtgcaaattgccaggtacaaaaattcaagcgaccaattggagtaaatcaaatcaatgcgacgagagagggccgttggtgatggtgatcaacggagacgctcattggttggcgccaatctggggggcgggccgataaatccgccgatatctttttttcttatcgtttttgctgtagcttcaacctctttttttcctttccttttctgtcagaccaacaaacatgtctacagacactcgagacccccgtgatcgggcagctcccccaaagaggaagtcccgggatgggtcagaggatgttcccccggcccgcaaaaaggtgcaccgcaaggccgacaaagcagatggccaagtccaattcgaggaatacagcagcaaaggcgatgcatcgaagcccaaagtgacccggaaatacaaggacaaatttgctcccaaacctgaaaaggaatacccgtcgatcaacgatctgaaaaagcgaattcgtgacgtgaagcgactactcaacaaaattgatttgtctgccgatgctcgcatcttgcaggaacgtgccctcgctggatatgagcaagatcttgcggatgaaactacacgcagagaacggtcatcattgatcaagaaatatcactttgtccgattccttggtatgtggccgatatgtctgaatgatcttgtgattcccgctaacgtactgtgttcttatggaatagaccgcaaaactgctaccaaggaactcggccgattgactcgccgcgagaaggaagagggtctggattcgaaacaaaaagctcgtcttgcagcaaagatccaccaatgccgtgtgaacctcaactacacgatctactatcctctcacagagaaatatatttcaatctaccccaatggaaaaccagacgcaacggacccaaagacagaattgcaaacgcaagaaaccaaatcggacgatgccaagcccccgttgtggtccgttgttgagaagtgtatggaagaaaagacactggaccttcttcgtgaaggaaagttgcgcatcaacgccaatggagagaagattcaagctccgtcgtctggcacagctacagctacggatacccacaaggagaagagcaagaagaaagatcaacagaaagataccgatgctacccaaaaggacaagcatgtttccaaagacaagaatagcagcaagaaggagaagcctgtacacaacgagcgggctgctaagaaacacgaggcaccacagcaagccaatgcagaggatgaggatgatagcgatggtggcttctttgagtaaccgattcataagtttgatcattggtttgtgtcttatttgtcttgatatccacactagcattctatacattctattgcaatataaccaagcgacctgttcaaaaagttcaccgtgtaataaccgggttctccacctgcatacatcagtgcctgtgatgtatgcccatagacgtatagttgttagccggaacacgaataaccgattttactttataaggaataccatctgttgcatgtacgaacggccgtccaaacgttgtaatagctattttgaactcacaccagtctacttagcgatccgccacccagtgcgtattgtagagttatagttcgtaacgcgattaacgcaataagtatgtataagttggcttattcgtttactttcaacctttcaccttcccatgttcctaatcaatcctcatttttgcaattagctctgctatcccaaccttcgttgcattgagctagcttcagagtcaatgcttcaagtagcttagggctacataaccacatcaacctctcacgagttcacaggctgcgaccactggatcaatacctgtgacctcattactgagatctgaattcgcgtctatctcgcatatctggcttttctacacatctactttgcgttgttgtgtctctcaattcgactttcatacttgtcgccatctcattgtgacctcgctgtccactacaggtaagatatcttgcaagattaccccctttatacttcgatctatatccttatgctctattcatgttcaccttacgatgtatcttgctgcatatggcgacttccatattcattgacctcctggctaacaaagcgcagatcttccaatccattctgaattctttcaagtcaagtcaagatgcctccagagaaagaggccagaatggcctgcgacatgccaggtagagcagacttcctcaaacaacaggaaatccttcgggatcattgcgcaagcgccctcaaggagcacctcgaagacaatcccgatgttatttggacacccgaagatggcgaaggacagccccccaccacgaaggaagaagaaactcagctcaaactgatcgtgaacatcgagttcgacccaaaaaccgacaagccaatcttgcctccgatcaacaaccgactatcagatgagttggtctatcttgtgagcaaattcacgaacgccctcgaactgtcacgtcgatacccatacgacttcgacaaaatgggccatatcaaacccgaacgtgtgtcttcaggaccttcccctatcatctgggctcacggcctccctttcttcccaatctacaaagggtattacatcctctgtggacgcgaacacgctaaatgcattggctggttgctccatgagcgaaccagggagatcatgcaagccaaccccagctggtctgttggggcggtcatcgcacctgaaactgccgtgagtgctcagcatactatcactcgtcagatgacacagcacaagccttatggcccggagagagagtcgcgttacaagggcaaagcctcggctcgcgatttcgtggctgcggagcaccatctctgcgctgttctgccggacctgatcacccgtgagattgaggtcggcccgttgtggcaagcctggggttacaacgttcgttgtggacctgtgatgcgtggcgtgagaacaactatcgtcccgaaggagtttttcgatagccatggtctcgaagatatcgactatgaacactttgctagaccgtacgggaaccacctgttggacgaggatgaagagaccgatgatgaaatgaacgcaggtggtggcaatcatcctggagatctcgctggacagagtgatgaagttgctagcagtaggaaccggtctgcttcccaaatggacttcggcatggacggcgaaagctcgatggatctttcaaagcaggccacagatgggatccacaaagaggtctcggaagaggacccagaagagttcacagaagaggctatggaagtccgcatgaaacaagtcaccggagaaatactgaaagacctcgaatccacgccctcgggccttgaggaggaacaacatgctgtttctagcagaattatgaacactgagctcagcttgggtatctgggattcaattaaggagttcattgatgagcgcggccacgatcagaccagcaccgctgctctcgcttttacggatgctgtgattcaaatcgctgcacgtgctcaccaaacccaggtgcaactgatgagcaaacaacctgaaaccaagcaggcagtgactgatgccgccactaacaatactctccctattgagctgccaaatgcggagcaaagcgcatgcgaacagcccggtactcagcggttggatcacggtgcagctcgggacttgtctgaagttgacgacgagactggtctcgactagagccaagtaccagcggaggctgtgcaggatgagggaaatttaaaactaaaaaagggaaattgaggtcggagatgggatcagaaatgagattgactctatctttaagagagatagtatcttccaagtgttgccttcttttctagggcttcatggtattgggggattgtgcctttctctttttgatgtacttctttgctttttctttctttccagtgacacgcagttcgtcactgtaattgcaattatttctacattacattattcttaatgccggcatgtacgccgcactacttgctttctttgaaaagtcaaagtacctgtctatcacccgtaatatcatctcaggccaaatagttcagagtctacaaaaagcccactatcagcatcgcgtagatctatggctacaggataatttggaagtgacgtgtcataaaagcagccaggaaggcggcataaatgtcaaattgaaaagctcaggaaagacagactaaaggaaaaaagaaaccaaaaaccaaaaacaccaatcatctcgccggtaacccctctagatacgtatgctggagctgaaatctcgatatggcaaaagatgtcaacgtataaaaagctcatataacatgcaggaaagaaagtccgaagttggcgccagagctaaaagcagggaggtgaatgtggtaagatgtgaggatagatggtaaacagatatgaaaagagagagataaatggccaaaaaacaagtcaaacgcaaaagaaagtgtgttgcgttgggaaagatgttgtcccgaaaaagaaaatcatatcgtgcgtaattcatagtaacttgacaatgaccattggatatgatcttcagtttcaaatggggtgtcgtccgggaaatactagcgatcctgcgctagcagagtcgagcagcgtcttgagtctagctcgaaaaacaggtgttcccaaaacacacatcaagaggcgtttacctcacatgacaatacagctaccgccactctgggctcgtctgcgtctcccgccaggagcagagacagagcctacgccggaagcatcgttctcgtcttcgtcttcgttgtacagacgctcggcttcacgggcacggcgtcggcgtcggcgagcaccagcaccagtggcgccggcctcctcggtggctaccatgtattcggcccatttccggtccagccgggatgcagcggtgagatcgccgcgcagaacacgtttcgtgtgttcatcaacggtcatctgccagccgtagaaacatttcagctggatgatttcgttgggataggttggtgctggcgagggcgagggcgaggaggctggagtgacgaaggtacttgtcgatggggaggaggcgtctgatgtttgtgtcaccgtcaccactgttgcaacggctttgcgggaggcacgcgggatgtatgcgttgctggagaggacttccctgacccctgcccaggtgacattggcgcagtcgaatatcataaggcgcatcccgatttgggggaggtcgtcgctgtatccgcggcggcggacgcggaagctggcttccatcagggtcagatctgagactctggtgttgtccatttcgacggatcggagtctcgggcagttcttcattacgcgaagcattcccgtgtcgctgagactctcgcagtagctgatgttcaagtgttccaactcttgggcacatggagattcagccagctgcaccagggtggcgtttgtcaaattctccaaatcctccagttccaaatgcgacagttttggcgtcgtgcgaatgacatcaatgacggattcatcggtcagctcggagcactgagaaacctgcaggccttccaaatctggaacgttatgggccaggcttttaaatccatcgtcggtcacttcagggcaattgtggaggtccaaatgacggagttttcgaggtggaacgatagggcgatcggttagaatatccatctctgggttctcgccatggatcagcatcttgaggctttgatcggttaggtcggtacgactcatgatcaagcgatccaaagtattgcgctcgaataaagccaaagtgaatttctcatccttgaacccgcgaatttcgctggcccgaagatccctcaaccgccaacaggactggacaatccgaataagaccggaggtatcaatatttctacaccaggaaacattcaacgttgcaagctgcggacaagaccgtgcaatgagcttcatggccgagtttgtaacattcgacagacccgagagattaatatattccaagcggggattacgaagaaggaaagtgtagatggattccttttcgatgcgacaaccctcaagcgagagattgacaacattccggcatagatccgaaatacgatctccgtccgaggaccatttctcacgcatctgaacgcagcctctgagattgaggtctcgaacaaacggaccaccgcaggtgataagcttaagcaaaacatcacccgggatcttagagtagtactcggtcgtatcaaccttggaccataattgtccgttgtagcacatctcattccacgccttggatacaggggcacagcatacaatttcctgcggggtgaggtattggaagatcttcaccttaagctcctgtggcatatcgccccaaaagtcaaaagatctggccggctgggactctggaaggatgacctcagtctccaccttcacatccaccggcgtcgcgctgcgtggtgacccacgcgatgctggcctcatatcggagggcataggcacggtgcgaggtacagggaaaccagggccatcggtctccatcaaacggatgcgagcgtttgcgccctgggactcaccgggagaaccagaacagccgggagtagcagatcggggattgaggccgccatagagctgggaggaacttccattgcctagacagggcgagtaggaggtcgacgatagcgaaacacaagagagggaagccttattgtctcggcggtagccagtggttgacgaggagcgtccgcgtctggtcagcgtcgggctggacgacatgcgttggagactctgcagtaacttctgacgacccttgagtttcggaggctgctctaatgggatctggccggtcgaattggtcggaatgttcggagagatactccccggcgagggtagggccccgtcggatacttgggaggccattttgccaacttgatcccggctgtagcacctgtgatctggcccacgaatatcttgtcgcgtcttccggggggcgtcggcacggtacggaggatcacacgagcgaggatagtaacggagggacggtggaaacgatagagcgacgggcgcgcagtcaccgggctcttaaatgggcatagtgttcgatctcaaggatgaccggtcttttggatattagcgatctgaaggtcagagagacatagagaggaagtgatcagaatgtcggtggggaaaaatcacattgaccgttattgtttgttgtagggccacggcgaaggaaccgtggaacaggtttcggcaaagataccgtacagaaaaccgagagaaccgaaagagccgagtagaagatacaaagggcgggggaagttgcgaaaggaggagagaaagagaggtgcaaagaggaacaagaaatggcggaatgcagagcggagggaatgcgatacctctgctaaacctggcactggccttttctcacatagcccgacgttgtactgcgcaagtacctcgcccctctacgttatctgcttatcgcttctcgtctgttagtactaggcaccggtatatacaggcatgtgcttgaaccatttcttaatattctatatcccggtgactttggagtatatcctagagtatatcctactttcatttctacgctacagaatgtcttgacacagatcgtctaatgtgaaaccaagtgcacacctcggctgacgacgccttgaacagaagatacaccgaattcgacgccacccaagcgggaatccactcgaggcaccgatccagggacaccccgaaggcgaagtcgttcctgaatcctgcgaggcaacccgttaaattcattttcgcctctttcggactattttcgctggtggggcgcgtgcggggaagacgactaacccgtggtacgatggcagggaacccatggaatcaaacatgccatatgtatgtcttccgaggttcgacttcgtattttacggtaagtttcctgtttgtctcgtttgagggttttgttttggaagtcaaggcaccaagtgtcagtgtagcaacatattcccgaggtccttagctcaaattgctggtatcaactccttaaggttgcatatgaagtggagaggtgatagtcatagcctaggctatcgtagactatttgccagaaagagacgtacgctaaatgttccccgcaatctaatcaaagccgtactccgtacgttgtatgtaagtctgccctcttaggtctctaggtcacataaagagatatgcaaaaggtatcgcaaattcaaatgccatgaaaagggggtgaaaaaagctcgataaaaataaaccccgataaaagaagtaagacaaatcatgcgttgatgttcatcatcatcatcaacgtggtcctagggaagttagaagaacagacactcgctccacaccggccccgaaatgatacccagtttcccggaaaatttggcatccatcatcaaaacgtaactttgtggggtatcgcgttatttgtgtttttttgtcaataagtaaaaggcggagggagaagggagagtagagtcgtatgagaagggattcaagtcaccaccatccaaggatgttcaagcacttcggtaatggtgagtcggttgtcaacgtcacgatcgagcatcgtgcggatgaggtcaatgcagtcttctgagaaaggaaggaaaggaattcggagggggtggtcaaggatctcatcgacgttgtagaacgggttctctttgtagacgatggtgtaaaggagaatccctagagcccagatgtcctgttccttgcctcgatacgaccggccctgtaagacctcgggcgcggcataatctaacaaacatagtcagcactgaatcctccccggtcaaagagaaggaaacttaccaatggttcccacaaagacatcaaatggcccgtttttgatatacgccgcactcccaaagtcgatcaacttgatccgtccctctccatcgagaatcacattctcatccttgatgtcacgatgtaccaccagggctttggtgtggagatgattaatggcgctcgcaacctgtcggaagatgttctggcactccagctcgtccatgttggccttgagctcgatataatcgaacagatccattcccggaagcccgtgaggagtcatttcaatgtaataattgatatcgtcctcgaagaagccttccatctccacaatgttagggtgcctgagcccatcccgccgtaggaagtccagaacatggatctccaatggcacagtcccgagtcgccgatcccgagtccacgtatccaccaggatccgcttcttcgtgacgaatttcaacaccatcttcttgctaggctgcttctttaaacgggccagtttgacttggccgtaggctccttgtcccatctcctcgagaatcacgtagtcgttgatcgttcgtttcgccggagggtcgttcttcgcattggcagccgagaccggaggaacgggctgcgggggacgggtggtcagaggctcagaggcagcctcactgagttgttgactaagtgctgacgtcggagcttcaatctccacagaaatcttggggttttccgtctgggcagcaacaccggcgtctaaagggcgatctgaatcagggtcatgtgtgggtgaggtaggcttagaacttggggcagatgatggcgacaggccagcagcgggtccagcagcgtggagctgtctcgagtaggttatccacaaagcatagaccaactctgtgactgcaacggtatcatcactctcatcagagtcactggtgcgatcactgcttttgctgcttttgctgcttttctctgtcttgtcctttgagaagcaggtgccactctgaaccacgcgcagttgaatgtccacgacaatggtcgagccatcccgatgcttggcaagcaagccacttggctctgtaaacacagaggcggcatttgcttttccgtcgcggagaatagaaagtgtccgtgcacgtcggaagctgtgttccggtatgacaataccatcaactagtggtacgttgtcctcctcggtcaaaacgtctagcatctcatcgaaatcgggtacaagctgagtgatgtgaagtccttccggtctctcttgaccgaagagaaccgaagagaacacagagttggagctgatcacgttcaatgacgaggacgagagcaccatcatgcctgcgacatgaggaaagctggagacttgcatagtgtaatctccttctcccttgccgaccgcgacgggaatacaaacgccagccgcagtgcgggcggcaaagtgcctcagctccacgattttagccaatcccttctcgagggatgtctcaagagattccgatggcaaacaaggtaaaaggtcggtgatcgactggcctttttgaacgacagatgggccccagattttttcgacttcacctttggcactcacgactttccatgaatcatcacactcgatgaaggcaatattctctgttatttcttccaggacccagatcaggccaccacgcttttccataacccagacgctagcggatccccgtgacccattgcgcttctgaatcgggaccacatcaccgcacagcaagacaccgcgtgacttattggccgggtggttgttgtttcgggcgtttcttgtgctggagccatatccgtcatcagtctgcgctctccgggactgttctcgtgaagatggtttgctgaggagttgtgctgtcactccgttcccaagacctcggtacttgggattgacggcggaaatgttagctctttcgggctgaagtggcatgcgggcagcgacgtcagtgctaggatctcgaagtttagccttgagccattcctggtgttctttctgtacaacctccaggatgctgagatggcgaacttcggactgaagaacaccaaagatgagacacgacaaatcattagcggccagaatggtccatggttccttggcttcggtcctaaacacggcctgggaagccggggtccatttgctgctatgggcgtggagggcggggatctgaaatcctaatccagcagacgagggattgagcgaggcgaaaggatccgcggaagaggtgtatggttgtgctagagtttccatcagcttgctcctgatagagacagagcataggtccgtgtatgtacgttttaagcttacgcgcctggatgtaggtgcagagaccaggtccctcctttggttggagatacgatcgctgggcaccgggctcaacaattgggagctgtcagagggatgtgatcccaaaggaatggaatcctgggcgccctctcgggtgctgaccggggaggaattgccgtctgcgaaggccttctcgaagatattgtcgctattaatctctgcgggtcctgtgctgggtccacggccatggagttggttatcctgggtttcgagaatattcgctcgggccaaaaggtccatcataccttgcatctccgtgtccccactggcgtttgcttgtgcgctggcgatcgcggcattggtggcggcccatcccatccggtcgcgcatgaaatcaacagaccttttgagaatgttctgacggctgtggagaaactcctcggactgctgggcaaaggaaaaggagtgtagcgactccagtggaaaccggtgtaggtccgctagatccgtaaaacttcggctcgacaaaagattggtgtgagctcgagaagatgagcgagaacggggagagggagaggggcgctggccagtcataggtgctagtgatagcgacgaggaagacatgtttggaagggtcagtactctcgagggttgattttggcgtatacgatccagtccagatgggccaattccatggtcgctgtcgaataacggggatctgttggagtatagaaggtgtcaacgttatgttaaggagtcgaaagaatataatcggctgacctggagagaggttcgtatcccgaagaaacactgcccgccgagctcctgagttggtctgtctgtaaagaaaggttgtatccggactcggattcgggcaactcagagagaggtcctaacggcgacgaaagaggactcggctcgcctaagtcttgatcagcgtgattcactagcttatgatcaagtcaatcggcgcgtctcggagtttccattccatgggcctttcaggaaacgtgacggtttggaatgatcagacgcttcatctccacggtcagatgcatatctgagcatgtgccagcgggtgaccgtgatcggctggggaaaaagcgattcgcgccctttcctttccggtgctcgatgagtcgtaagcccaatccgagtaccacggtaacccgttcttctcgccctcacctccactagttccccaaggcccatgaaatgagaaacaaagactaaacgatcaacatgaagaaaaagcatgtgcgcgtcactgaccatcagggttgtaagccgaccccatccccgaggtctctcttctctctcttctgtctctctttttgtagtttttggttatgctcggctttaaattcagatgatcagatgggagacaaagagaaataggctcaatggaggcgagcaatcgagaatgtatcgagggtatgcgacatgtatccggtcattcgcaactgtgacggggattgggcgggcagctgcctcgtagggtctcaggcggcatatgtggcgtcgcggctgggcacgcagaaaggtaggaacaagcagaggaggtcgaggtgaatctttcaagggggaggaaaaagaaaaagagcagcggggaagagagggtggggagaggaaaatgccagatgcgagaaaaagggaaatgggccccctccgtgatgtaataactcatttttcctatgttttctatgtttctatgttgctacagccatttctccttcgaaataaaattatatagaagacaaaatgaacattttatcttgcattgacggtttgtcttatccagatcggctgatcgacatttctatcccatgtggcggaggaatttgagaatcagcccttgagatctatacaagatagaaatcatggctgatatatcttaaatagaaccaagtacaaagctaccaccctaatacgtgagtccacttccctcgctccgccaatgagatatgccatggataagttatttcccatcgaaaagactcgagatgatgcaaagtggctttcttaatagatccgagcgtcttaatgtgggactttgacccctttggttactagctttctatgaagttgaaagactgtctcacatggtagatcgaggcagagatgggattgaaaaaactagattctgccaaataaatgtctccgttaatggcgtggtctgtaacccattttctgtgcgggaattgagtgataatgcagcctggcaggagataagaagtgggactagccttgacccatatgtccacgggtacttccagtgcatacgcaagcagtgaccttggcctaatccggagatatcacggtgggccagtccctgacagagggtcccgagagccccgaaggctgtacagcgccaactcactatgctcggagtcggaccccagattgtcatctccgctcattccgaacaaggcattaggtttgggcttgcctcgagtttggtctagatgccgcgtctgctcaggcggcggcgatgtcgagctaacaaacccggacaggttccgaccaccgcccagcatccatgagaatcccgaatcggtcatagaagttcgcacagttgatcgcgagggtattgtccgcgcactctccttcttcctgtgtgtccgacttgctgtgtctaggatagaattggttccactctcggccttcggcccggtcatatccgctttgacaggatttattgttggggattgaccctcgttggccacaattttgccttcggctttgcccgttgtggatgtgattgtctcttgtaactcggttggttggctcaattcaccgtctacacgggggtcaagagggggatctactggtatcgaagagtctccaaggcagatctggacactctcaactttgaccagagcctgcttcactgcgttggtcgtatcagaatccaggtccttgatatttgccagctgcgatccaaggtcatccagcgcctctcgcagaatcgttgccaacgcctggttccttttctcaaatagattgatcttcgtttccagtctgcccaaggccgccgtagccgccatatccgaggctgatgtcgcggaaacaggcctcgaactaggacgcatattggcttcaaaatgcattgtatgcatatttttcctggcttctgtcacggcgcctcggacagctttggctacgccccaggtctctgtccgacgttggattccctgggagacgtcttggaaaagagattcgagacttttgggactgtttcgggctggtgatccagcaggtgggctgctttcactgcgtttcttaaagtcttcccaaaggaaggccttcctcgtgggccgtgtactaggctggttgggaaatttggaatcgggcggtctacctgaatatttcgatatgatgaaactgcctcgatcggcggtagggttctgttccaaatataatgcatcctgcacaaaagtctgagctgtgtgtggttggggcgaagggtagcgaagcaataatgtcaaggcagttgtatagtcggccgtaagcactaaatgatacatgtcagcgaaacaagatacgatgaggtattaaggtcgaccaacattgccaacgaattctaagtagcattgcaatgcacgtgaaatccacaagatcagaccgtagtccatgagcaaacagtaaatcccacatcatcaggacatcatcaaatggaaattctcgcccaaacagaaggcgcatccagcggcttctcagtagttagtacagaagaaagtagataggtgactgaaagctgcttacgttaggaaaatttgcggtaatatgtccacagcttcaaggtgctcggcgagctcatgatcgataatcgccaaagcttccttatggagataatgacaccgatcaacaatcggaatgacatccatctggccattggctgaccgtgtctcgccgtgctcatagtataaacgggccgtctgcattacagatagaaacaacgtaaatgaatcatgctccacgaattgtgcatcaagcatctctagcatcaaaccctcacttgtgtccttgttcgcatcaagtccttcggggtgtggcttcaccgagtctcgatctactgcccagagaataggggcgagtaattcgtgcattccttgcctataaccgacatctggattgagcttcgagtagacgaacagaatatcagtcaacttggctttcgtgtcgggctcttgaaaaaagaagttttcctgcaagcatcggtcgacatcttgtaggatctcggtacgcagcgtctcatcgtgtcggagtgtttgccaaggggactgattgttccaacaaaaaataattagatcggagagttcttcgagttgggcggagcacagcgagagggtaattatatacctgctcatcatccgccagaggatcaacagtcgactccaaatcgtctggatgttcgatgtatttcaagaaatgatctcgcagtgcacgataggcaccccgagattcgtccagcttaggcgcccattcagtcttctccaacccgtcgaagagtagaaatgcctgcacgaagaatgagcatatatctccacctcacgttgtcaaatctccagaaccttccagcaaactgatctcagtccgtcattgcacaggtttcctccttgctcggattgcaacgccgctcggaggtcggaagtcgtggtgttgtcggagaacaaaatgtcccatctctttctgtgagggtcagtaaaagtaaaaattgacagacagcgtgagagaaatacctggtctcctcaatggttctcattgctgaggatgagggagagaacaatagaaggtgagggggatgcgggcgatagtagaccgcccgtgccttatctcgcgctactgccctgactcggcccttgcgatgttccaccgctatactccggtttagttcggattgggaagtttgcatatctaaaatgatatagagtgcggctgacattggcatattcgatcctgtgtcgttctccctgcagaaacccgctgcatcgctgcacttttatgtcacctctcacagcttcatgacactagtgtacattcaagatgtccgctgatctactagcagagtttggtcaggcgcctgctccggacaataggccggaacagcagccatcgcaataccacaaaaactcatccttcgacgacgagagcatcgatttcttcgggtcatcgggaagtgtgcagcacaacaaacgtcccaatccgactcctggagcagccagtcaacttgcaactccagcagcttcgtggcagggacctggtcgtcaggaatttgacattcccttgaatccacatagtgatgtattattcgatgcagcatttgacacaccaacaagtgatgcagacgatgactggggcgaattcgaggtccctgattcagacacgctacatgcacaatccactcttgtacattcatcaacagctatatctccaaaatcagagcctcggcaagatggtccgcaagcttctaaaacaattgacttgctcgattcactctcattgcaagactttgcaccggctgtgaaacttcactcgaatattactaaaaagaagtatcctctcaaacctgataatagccaaaatcaggcgacatgggaggatgattcgtttggtgactggggtgatttcgccgatgtgcctgctagccaacctccccccaaggtcgccgagaagaaaacacgaccacctacaaaaccgcctgtcaaagccactaagccgcttgcatcaacctgggatgacgacaccttcgacgactgggatgatttttcagatggacctagtgtcaagcctgtgcctaaatccaaacccaccacccctagcccagctcctactagctctgtttctgggaccacagcccctgcagcaaccgtgcgtccaacaaacatcccaccaccatcaatccttctcgagttattcttggatgtgtttgagaatcttcagaaggatgctacactcgcaaaatcccaactgcgatcttcggccccactgtcatcctcatcttcaagcaccgtttcaacaacagccttaaatattcacaatgtacttcaatcggccgcccgcgtaattgcagggcgaagtctccggtggaaacgtgacacaattcttagtcaaagcatgcgaatcggtcctgcccgttccggcaaagccggtggtatgaaacttaacagcgtgaacaagcaagagaacatcaaagaggaacaagacgctgttgacgtgctgactacttggcgtgaacgggcggcgattttcaatgctattctacaagcggcgggccagcggccaatccttacgatcccagatcctagtgcgctcaaggttattacggcacgggcggaccagggcgcactaaaggcatctcatccatgtgcactctgttcgcttaaaagagacgagcgggtgttacgggtggatgaacgaggtgttcaagatagcttcggagagtggtggacggagcattggggccacacagcatgcaggcaattttgggagacaaatcgaaatctgcttgggcagcgttgaaagctagatatgtatatagaagaaaaagttgtacatgaatgggtagaataaagggaaatgtcaaatgactcgaatcatttggatcatcgggagggaacccgacgacatccctatctcttccctcctttcaccctctcatacttccctgctccctcgagataagattttgtatccacatccctgcgaaaccgtctgattcgtctttcgccttctgataacaacacattcccctcacggccctcatgggcctcacgggcccccgcattccggccacgctgattcctaacatatcacaatacagatggcgggtaatggaagactcgcaaaacgatcgtcgaatgcgtgagtggcattttaaattaatagaaatgcataccgctgactatttagttgtgtgcgatgccggagacagaagatcaaatgttccggggcgcagccctgcgaaaagtgtagcaggcgaaagctcacttgcgtctttgataaccatgaccagaaaatcctggtaacaagagggcaagttaaatggagtgttaagaagaatcgatatctcacatttatcgcagttacattctagacctgcagcagaagattgcgcgtatagagcagagccagaagggccaagtgagccctttcagcccgaatttcgatactcagacatttggtttgtcttactttctatttaatctatttaaatggatgcctactaacctgttgcagatcccaaagatcgcgaagatgtacctcctttgcagaggactagtcctccagaggatcttgatgaagcccaagacctggaggatctggactctgggctagctaaccctttgtcgtccggtcctcctgcatttatgtctgcagcaaatggtcgtacatgtaggttatgccggtttcttggaatgcgcgactctaacatccacagtctatcttggaacatcatccaactggtcgttcacccggcgagtcctcagcttggcacatcagcacctctatcagaatgtattacctacagaaactctgatatttgatgaaacgacctatgagctgggatgggatgggttacgaacaagcccgggcccagatgttccagttgttccgactcgcgatcacaccatgtatctgatcaacgccgttcaatttcggtgcgggcaattgtatcacctttttgaggaaggagagttcatgagttctctgcatcagtactacttgggagatgggcaatctatgacaaatagcttgtggtacatccattttctcctcatcctggcctttgggaaaggatttgttcaacccaaggctcaaggtagaaaaccaccaggggtgtgctatttcgtcaaagctttgcagcttctgcctgatccgactgctctgtaccgtgatcctatgctgggaacggaaatcctatgctgcatcgccttatactaccagtgtgttgactttcgaacttcggcacataactacgtaaggtttctaaaagaaacgtctcatttgaaaaacccagctgaccaatgctttagatcggacaagccatgcggatggctatggcacaaggaatgcacactagtatgccagtcgaggatttaggacatgacatggttcaaagatccagcaaaatctggtggactatttacattctggacagagaaatgacatcgttaatgggtctgcctcagtcgatcaatgaccgatatgtgcaaacccagctccccacctttgcagacccatcagagacaatgtcattgggcatgcacatcaaattgtccaagatcattgccgaggtgaacagcagtaagagttcctgagcttccatcgttgattatcacctctaacaaaaccaacagcaatatatgttatcaatgggcgctttaatcggacttttctacttagcacaaaaacagcattggcgaacatcgcagggcttgccgatgagcttcgcgagtcatttccgctacacttggacccaggcagcggggtttctcgaatatcagcatacttacatcttcaataccaccaggtatgtgtcttatcatctgcgggaagagctgcatccgctaggttctcacatcatatgcagtgtattatcctggccacccgacctctcctattctgctttcttaagatccgcttcgagtccccagaaagctgtttggaatccctcaatgcatcccaaaatgtccgaaacctgatgcaaatgtgtcttgaatccgcccagaacatcatcagcattctctccagtttgcagagtcaaggcctcttaggtacaacaaactttcgctacagatacgcccttgtgactaacacccaaatcctagaaaccttcctcccctttgatctagaatcagtcttcgtatccactgtcatcctcctcatgggcccagcgatcgacccgcgagtattagagagtcaccccaactggctagagaaagcctatgccatcttcggcgaaatgatcagagacggaaaccaagttgctaaatttcggcgatccgagctccagcagctacacgagacattactaggctgtatctctagtgatcggcctcgacacttagcagtccctgacttcttccagcaggctgagatcatcgctgacccagcttctccttcttcaacgccgattcctggggctatggctcaatctatccgatataatgatgcgcttctgaggccggatcctggtttggatgtggagtgtgattttactacgatgctgacttcggctgaggttatggctgttgcaaactcgattgagagttatgatactgagtgggtgtctaatgcgatgatagaacatagtatatggtaaattgaatgtctgatgaatgacgaattgcaaatataaattccgtgatatttttatctgttccgaaagaaaaagcaagacggtctatgccttgaatggttaactatacgttgaactcgccgacattaaatattcaaatcatctaaagcttggacagtatcgtaggccggatctcagagaactccttcgactctcccaggcgccagctcacatcaccaccccaatcccccttgccctcattgggatcagtatgcttccatttccaccgtgcttcatgctgctgaccagcctgcaggaaatccgaaacccacgatccaaagatagggaacatcttgaacccatgcccagaatcaccagacaacacaacaaccgacgacgacgtctccggaacaaaatcaataataaagtccgagtcatcagtatctgcaaaccagcaaagcgacttcttaaccagcgggcgattcgcaagcgccggaagagtctgcgccagcaacttcctcatcttcctctcgtcatgctccggcacaaacgcactttcctccaaagtcccaggcgcatgagaaactccagtctcaggatccgtattgatatatcctccacccatgggacagatcttcaacaagtttgtctgaggatcgggctcgaagaggaaacccaagtcacgagcataggtgacaggaataccacgcagcgcagaagtctcttcatcggtaagatgaacatgcgccacagaccacgatttggccacgaccttcttcccaatctccgggacaagacgacccaccgcaccgccagctgcgacaatcaccaacgaagacgggtggaacttcccatctttcgttcggatcccggaactcttcttgccttgcagcgagctgacatagacgatttcatcgactgcgccgcgctctccgaggtagaagcgtacgccggctgcctgcatagcgcggtagacacctgccagtgcgttcccggagtgtgcatacccgtcgaagcggttcaggtatccattccacccagtcaatgggccgtcgagctgccagcaggcttgacgaatgtcgtcttcgcccttgatgggcacgacatgtgatttgagttgatcgttcccttctgcggaagcgcggaatctattgagggtgtcgatagccttttggggtgcttcgccagacacgcagtggaggaatccagtctggtggaaatgaggtgcgaaaagaggagttttccatgcggcgatggctttctagttaatagataaaatgagacatcggtcagtaaccaactcggttatagcatcggaaatcgtgggcttacgattgtcaaatcggtgtagaatggatcctcgtattctgcgcgcacaatcttgttcaggtcattggcggctgaatagcgcggaggaatctgcttgtctctttcgaagacagagatattcgtaaagcccgagcgagtcaaatgaagagcgctggagagcccgaaggctccgccaccaacaatgatgatcgggtcgcacttggagatacccattgtgaaatttgatgaggaacttctaacagatggcctaatagttcgatatctatagctccaggccaatacaccttcatgagtcgacggcgtcaatgccgactctccgggagtagtgcggggagcgcggagaaatggaccatcgggaggccttccgatgtgcccaaatggggttttggatgtttttgataagaaaatgcaagccacgtaagaggtcagatgtggaaatgataattagaataacgtatgatatggtgagggagtacatttagtcagagtcactttattggtacaagcaaagtatacgaaacatagtagcataacagaaatggataaatcagattattgaagtcctacgacgttaaggacagaggctggctcctattgtgtcttatactaatcttaaaagaggaactgatgaaaataaatgaaagtatgcttagattgcgaaagtgcatatatgttaacaaaaaacctataaactattcattttatatctcaactttagtggttgctagggtacataaacccctcatcctgatcaaagaattcctccttaatcaaccgtgggctaacaaaacgacgcagagtatcagagctaccagccttgtcgttagttccgctagcacgcgcaccaccgaaagactgttgtccgataagggcagcggttgtcttgcaatctgtaagaggtagacgattagatatagcaacaattcacgttggtactgtgcgacttactgatatagaagttgccggcagagtatcggagcttatcttcagcctggcggatagcaccacggtccttagcaaagacagcaccagtcaaagcaaatccgcctccattctgatcaacagacttcaaaatagaagcccattcggcatccttgtaaacatacagggtaagcaccgggccgaagatctcctcgttgaagagacggtggtctggtgaatcggcttggtacacggtagggtgcacgtagtatccaacagattcatcataagtaccaccagcaataagcttcagcgaggggtccttgttgctagcatcaatgacggacttgatcttctcgaatgatgcacggtggatcacggggcccatgaaagcctccaaatccttgtccgggtttccaatggtaatctccttgataccagccttcaacttagtaaggaactcctccgcgcgagactcaggcaagtagagacgagatgtggcggagcatttctgaccctgatactcgaatgagccgcgaatggtgtggttgactgcactggtgatatcggccgacgggtgaacaaggtggaagttctttccgctggtctcggcaacgaagcgagggaattcgcggtatctcttcgcagcaacaccttgtccaatcttgccatacagagagcggaagacatcggaagaaccaatgaaattcaggccggcgaagtcgcggtgtgcgagcacagtctcagtaatggcttcagggtcaccggtcacgaattggatcacattgggagggagaccagcctccaaaagaatcttgtagagcaaagagctggcgtagacattagatgccgaaggcttccatagtaccacattacccatcagcgcgggcccgcaaatcagattgccgccaatggctgtgaaattgaacggggagacagcgtaaacgaagccctctagaggacggtagtcgatacggctgtgactagttagcaaatgatctgcgacaactcaaaccagtcatactaacctccacatgccatcagtgccacgagttggctgcttctccaagatttcagctgcccagttgcagttcaggcggaagaaatccgccaattcagccgcggcatcaatctctccctgccaaatgttcttcccttgtccgagcatcgtagctgcaataatctcgtatcggtacttggtgcatagcaactccgcagccttgaggaagattgaagctcgatcaacaaatggggtatcctgccagctttgctttgcctccagagctagttcaatagctgaccgggtctgctcatcggtggcaagtgggtagtttgtaaaggtgacggcatgttcggcaggcaatggttgatcccaagacttggagcttgcctggaattttccatcatagaagagctcactccgcacgggcagctgagagcggagcttcgtcagtgctttttcaagcttggcgcgctccggggagccttttttgtatgaaggctatagtgtgattagcattgaggtgggttaagtagttgtcgcactcacgtttggttcgtttcgagcatcggggagacggaatggcatagtagtcttagcccgagtctgaacagagagtcctgcaggaacagagcgcaggcgagagccaataggccgtgccgagcggagtctcatgagtgtagtagacatgatggatcgcaaggttgagtttagtgaatgacaatgtaaactcaagaaatcagtttgagacaacagactagtttaaacgtcaacgacccctcttagaaatgtcggaggcttccccgtttaccccacagaactattgcagtgagcttgagctccggacaagataaagctaaattcatagctgctgttcgaaatctgcagcatcgggatgccatccggtgatcgtatcaggcttgattgggtattgtaatcatatatttcaagtagataagcatgagaaatcatgactatgtgattcaaattatcattatgcaacaagaagctcaatcaaatgaagctcgctggggcaatcctttgctaggacagctagcaggcgatctcgccgcggcagcagcctcggcgtccttagtgacacccgcggtcgcaattatcgataggttcgtctggatgtttccaagcgcgatgatttcgcgctaatacataccctcagagcgcttgtcgagcaagctgccttcaaacaacccattctccgcggacttcatcggcatgcgctcgcggccctccgacggccgggtctgtttgttttccaacggccattcggtattgtctgggccctctatgcggcaacctattccgtcgcaaatgtgaccgacacaatcagtcacaagcttgagataaccgccgcggggacgatcacatttgccacgacgatgatggccaatgtgccgctagcgctgtggaaggacatccgatttgcgcaggaatacggaaccggcaggggtcccgatgccaagacattgacaacaaacactccaatctctgtactccagaacaaatctttggcacgaactgcagctgctatcttcctcgcacgagacggtgtgactatctttgggtcatttactttggccccgtggttgtcggatgccatccccgaccgcttgatgactcatcccaacgcaaagccgatcatcacccagttgaccgtgcccgtcttaactcagctggttgctactccgttacatttattggcattagatatgtacacacggcaatatactatgcccttcctaaaaagggtaaagcactcgcagcgatatctgccctcatcaactttgttgcgttgtgtccgtatcattcctgcgtttggaattgggtgcttgacgaatatagagttgcgatctgctcttcatgccaaagtctcgggttgaattaattatttatctcattatcagtccatgtcctacatgaatggctggggcattctacctgtgtggcgttcagtccacctttctcgatatcactgacgtgcgccagaatctccgtctggtagggcgtctctcgtgcaatttgcacagtatcgaagacagacttcgactgaacaaaaatatcatcgatctcctcgagtgtacggcccttagtctcaggacagaacaagtagaagaacacacaagcaaaggcgctaatacatgcgtagacaatgtaataccgccagtggatagtagcgaacccgactgggctcacctctgccaatacgaagttgaagagccagtttgctgcagctgccatagcagtaacttgagcacgagtttttagcggtgcgatctctgcggcgtacatgaatgggacaaggaaaagtccaatggggaagcagaaaagcgctacgaagtagaacaagagtgaggcgccagccatggatgtgtttttaagatcactcgatagcccagccaaacaggcctgggcaatggtcataccggcagccgcagcaatgagcaatggacgacgtccgacgcgatcgatgagtagaacggccacgcctgtagccaaaaattgccagatttgcagacacccagtgataattcccgagagtgtacctgagtatcccagatcgcactggaagataatatcagaataaaaagtgatgatgttgacgccggtcatctgcgctagaatatttacaccaacagcaataactgtacggtgcaggtggcggttcttcgtgagcgcgaatggcgacgaggaacctgctggttcggcgttctcgtcaatttcaagtgactgtcggataatttccagctcctgtaagacatgctcagagtcgacagccacattttccatgcgagctagaacttcagatgcctcctcgagacgtccgacacgtgcgagccaccgaggagactcgggtagcagcatgatacaccccacaacaatgagaccaaagaggccttgagaggcgatgggcaaacgccagctgaccgagctatcactaacataggagagtccgaatcccaaccatgctgcgaaaacaacgccgccaattgcaaaccatccctccagtagcaccattcgtccacgttcctctgctccagatgactcggagacgtacattgggattgtagcggtaaagccaccgacaccaagacctgttcagttactggttaacttattgcaatctgttcaatgataaggggctttaccagtaatgactctgccagcaataagttgaccgagtgagaaagaacttgcttggatagctataccaacgaaagctatgcaaccggcaagaaagatggtcttgcgacgaccgagtctgtcacctaaaaaggcgcaggaacctgcccctattgcgcatccaacttcatagatagcgaccgttgtaccttttaatgatcaacattgctctcttgaacatctgccagctgattcatccgagtagataccttgaattttagagttgtgagatttctcacgaccagtagtttgaacggtatcgacttgagggaatacggcgatgaaagagtctagtatcaacaggccattggcaattgcctgatcgtagccctgcagtatgaatccgacagccccaataagactgatggcgaggctcaatgacttgcctttgagcttaggggccatagcgtccactctacctaaagtctcttgtcggatgagttccaaatcttcagctcgcgattccaacacaggggagaacaccagaaataaaaaatacggtactcgatacagcaccccacttagtagatcctgaagcggagggtcccagactaaaggagacggactacctgggacttctagaagaaagacaaatctgccaagcttcggatgttcaccgaatgggccaaccagcttcgcgcatttgacggtaagtggatctcgagtttcttcaagtttggtgaagtacagcgctaataagtggctggccaatcaagttccggattatcagcatccgtggccccggccgcccgtagtttctccgcattctcatccatatattattgcctatagtcaatatttcatgttgatctttcctcgttccctactaatacctcaaatccacttctccctagttcgtaggctgcatgtcataatttaggacctttgtgtccagacgagagggctgtgagcctgaaactttaggtagcagtgagctcctagcacttgtcatgttcatcctccatcacatgacttttggcgcgatctgcacgattgcccatcacgtgactatatagatcgttgacaccttcgttccttcctctttggtatttggctctttcctttgttttttcctttttagggctgtctacaaccttatttaagcgagacattcgagttttgcaccgtttgcaggaaagccaggtatataaacaggctgattcccacttttgaacttacttcttctttctctcttcatcattttgaatcaaccacatcacagagcaacccctccgacatgttatcgtgtccataatccatcacatgacttgtctgctcttactgtctctttttcatctacttgcattcatccttcatgcaaccaccacatcacaggcatcccttcatggcacctgtcatgttcatcatccatcaatggcttgtatgttcttgctgtctctttttttctcatatacttacattcatcattcagacatcccaaccacattctccttccacattcaatcttccacttcatgaagtttgtttcttcttgtctgtgttgtgacctattcttcatcttccctcatcatattctatgacttggtaaacacctgatgacatgaggctgactgtactagatatgtatgctcaaccacatctgctcaaccatatccagccttgccgagacagattccgccttcaggactggcagcatgcttgcaacaacagcaaacacaaaaacagaaacagaagagaaaccccccccccccccccccccccccacgcaccaccactactgcgatgcttcgaccttaaaagaggaggaatgaaaagaaacggtcttgaacgacagagtctccgcaggagtgtctctgaaggagacttctcgtcgggaagaggttacagcgtgtacccatttaaaggagactctcaagaccgtttgctgtggtggtataaaaaaatggtcgcctcgacaagcatgcatcgacatccaagaaccacatccaagaaccacttcaatccatccacttcaatccatccacttcatccatccacttcatccatccacttcatccatccacttcaatcaaccatcgacattcggcattcgactactgcgatgcttcgaccttaaaagaggaggaatgaaaagaaacggtcttgaacgacagagtctccgcaggagtgtctctgaaggagacttctcgtcgggaagaggttacagcgtgtacccatttaaaggagactctcaagaccgtttgctatggtggtaaaaaaaaaaaggtcccctcgacaagcaagtatcgatatccaagcatcgacatccaagaaccacatccacattctactcattcacttcaatcatccaccaatcacccacttcaatccactttaatcaaccttcaatacacaatccacaatcaacaaaattcagattcaatcacccatgatgcttcgaccttaaagaggaggaatgaaaagaaacggtcttgaacgacagagtctccgcaggagtgtctctgaaggagacttctcgtcgggaagaggttacagcgtgtacccatttaaaggagactctcaaggccgtttgctgtggtggtaaaagaaaatggtcacctcgacaagcaagcatcaatattcaagcatcgacatccaagctcaaccgcattcaacaaccatatccaagctacacttcaatcaatcttcactcaactatccatattcaagcatctactccaagcaatcatatcaagcaaccccttcaaggcaaccacttcaaggcaactacttcaatcaagtttctacatccaagcatctatatcaagcatccacgtcaaccatccactcaatcaaccatccactcaatcaaccatccactcaatcaaccatccactcaatcaaccatccactcaatcaaccatccactcaatcaaccatccactcaatcaaccatccactcaatcaaccatccactcaatcaaccatccactcaatcaaccatccactcaatcaaccatccactcaatcaaccatccactcaatcaaccatccacttcaagcatcgacattcaaacaaccatatccaatttccacttcagtcaccatctatattcgactactaccatgcttcaacctttaacagcaggaattaaaagaaatggtctcaaactacagagtctccgcaggctctaaaagagacttctcgtcgggaagaagttacatcgtgtacccaatcaaaggagactctcaagaccgtctactgttcaggtaaaaaaacactatcgcatcgacattcgaactttcacattcaagcttccacttcgagcttccacttcgagcttccacttcgagcttccacttcgagcttccacttcgagcttccacattactcaactatccatttgaccacccacaatgcgcttccttttaagaggaggaatagatagactcaaacaacaagtgtctctgcagcagattctgtctgtcatatactacatctcgttacaaacccttgctccattcgtaacattccttgtagcatacatacatagtcgtttctatagaggcataaaccacagctaaaaattaaactcaggtaaatcagtaaattaattaattgaaagcaaatcaatgcaaaatcttacgttaagcctcattcacatagtggtcaggtgaccacccggacaccctcagatctagatacgaatagtaactccctcttcgcacccattaacactttgtactttatacgcaaaccccacgattttaccccagaaaaccacacacaatcgtggccttcccgcctgacttatacatatcgcttaaatgatgtttggtggtttagcgctcgtgcctgagctctctgacagcatgcagatctttacctaaccttcctctctatacactatacaggcctaatttagagaaactcgaggtataagccagtgcaatacattgatcataaactcatatactaccggatacgctatgaagatggcgaaagagaaaacgtcaacttggctctgcggaaaacctccgccttcaacgcccgatactcattatctgtccgcagaacagcatcacgattctcgattgctcgacgcagaagataggccagacattcacccatatctccccaggtcgagcatttgtaaacctccggtgtcccatcgccgtcattcatctggagcagcgtgaagctaacttcatccgacataccatggagttgggcgaagcgcacaggcactgtgggcaagcccgacgtgacacgatgcttatagagtttctgggcagcgaccacactctccttgttatgacttgccaggaagagatttaccgaggggaattcgcggctgcccttgtctccaaattctccaatgttctttctcagcgccccctgagcaatcatattataagcgttgtcggtgtcttctttcgtgtcgtggatcagggaccgttcatcggtggccatgtatgcgcccctcacgagcttgaggccgagagtgaatccatcttcacttgccacggttagatggttggccagtgtcgctggtgtgcttttgaggtaggcctggtaggtactgtagatagttgcataaccgtcgcggttgtatttgcgcataagttcaacagcgacccgtgcaatgcccttttggaaatgctgagactcggcatcgacgaggatgcgaacttttcggtctttggccttggtgcagatctcatccagtgcgtccatcatttgctgcggaggcaaatctccagcggcgaaggcctcggtggctttgatgccagcacctgtcaatcttgtaaatggtcagtcggtaccccatgaatgggtggtgtgagagtaacttacttgactgcgaggtaatcttctgcatctgacatgtcgatggtctcgactgttcccttccgccaagcttcgatgctgggacattgggagaccggagcattaatcgacacgttcccatcctcgcttttcaaagcagcaacgccctgtccgtgctgagcctgagtactatgatcaaacacagtctcagcagcgtaagtcaaaatcacaccgcggaagcccatatctttcatttcccggatggtagatctgcattccgccgcattctctccggcgcagaattggttgtagaacgttttctttagaattccatgcaggatcggattccgatccacatcaaagagccagatcctgttaggtttggagaggaaggacataaaggaaagcgcgggtatgaggaggaatctcttcgacgatatcgtagagaccagcagagatctgagcaagacatgcgcgggtaagatagagagaggtggtagtgaggggcttggatcagtcttgacttgtgcctgtgcttgcaatgttgaactaaagcgcagtctcgtggaggcaggcacgttgctcgttcgaatgcatcgcgcaagaccggttacaggctttccgggaaataaggtacgcatctctgttatgatgttatgaatttcaactgctcattccaaattagacgaagggaccagcttctttatccttcaacattattccccgcgtatagtaccagatagtatatcggacaggcctccggtgcttttgatagctgaaacccaccatgcggggtgattatcgctggtgctggtcagtctctccacaagcagtaatggaacccgcaaagcgtattcggaagaccgttttcattggtggtccagatcattccttcgtggaatgtctgtacggaagactcgccggtggcggggttgcttgtccatgttatcaacggtatgcctaccgacagtacctatttttatcaagtgacacaaagatagactggattgaagtaatcgttgtcaagttactaacggctcatttcatgtagttgtacggaatattgatatcttatacaactcatgttttccgatgtagatttgctatataggctaagggcgaagagagaatactaaccacagctacaatgatgcacttatcggaggaaaatatcattcattcctagatataagtatgtaacccttagtccattcttccttatccgctagcttccaatttccatttccagtctaacaaatgagagcagcctacgcatggcgcacgagacagaacatcagaccactttttattatctcttttctataaaacccactcgttgccagcattagaaatcctcctcgaggaagcctacaacaacccggtatacctccgactctccctcgagctcgccgagccaggctcaacaatgccgttcatggttctcagcgcgcagtaggtattcttcggcggattctccctcgcatatctcatcccgcctcagatctgttatcgcttcgtgggatatatagaaggagaaggagctgtgatcacagactgacaggcaatccatgacctcgagaatggtcatatgcctgaatgggagagctggctcccgagatggcaactgagtactggcagatgccgggctaacgctgtatacattcattgctgatgtatatgtatggtgaagaagcgaaatattgtgatttcaatcatactttagtgaatttagatcagaatcaagatccgaatccttttgcggcggaagttagggttctggttcaattttcttgctcgtccagggagctgtagggaaataggtgcttgattgaggaatcagtatctattctctttagtaaatcttcatcactctaccattgagtgtgtttgtttatggaaaagaaatcactagagctctatctaccatggaagtggatgttgaacatgccgataactacgtgagtcgctagatataactaataagtaaagcttttgttatctacacaggtgtaaaccaagcccaaatttgagaatcgtgccagataccaagttctgcatgtggaaaaaggcgatgttggacgaaggcgggtgagatgccgaggctcgtcgggaggtggtcccgactgaggcctagacatacaactggtcagcgacgactgtatagagttctgactgataattgcaacccatttcggtctgtttaactggcttctggtcaagttaggaggcatttattatgtagcggtgtgggtttgatttgagtctaaccgaatatgcaatttcgctagccgatcaagggcgactatcaaagaaacttgagattctacgcattttaaacatactaggagatacggtgctagacatgtagaagagaaatccgaatgatgcccaagtaataccatttttgggataaaagagtagagatattgtaagtacatgcaggagaatgccacaccagaaatgagaggcctgataaccaaagcatgtagatatacatagctatgagtttgagggggccgaggaaaaatgccgtgggtctggacgcgtctgcgttgtgagctggaaccgaattaggcgacaatgaagtggcctctctagagattccacgtgcctttggccaagcatatctttcaattgagtctgcaaatttgggatctgcgggtccacgcatgctacgggtgcattaagggctccgatgcgcggaccggtcagagaaatccggttcacttctgcgccaagcgtcattttgggcatccataccgggggggttgggtccggagttggtgcgagagcggtggtggcagagcgttttcagtgatcagccattatcaaacaagggataggctaccacgctgctagtttggtgaaagtcgtgtgcattgccggtcaatgactgtcgtaatcgaggccatgacaggaatgacacatcgcaggagatgatatcaatttcgaatgtaaaacaatcggtgcctaataactttgcgccgataccgccgcgggctggaataggttagcgattcgttcaataaggtacgggatgcaccagcgattccatgggcgataatccaaagaggggttccttacagggctgttcaacatgctgttgcgcttgtttcggcccttcttgatgtggtttttcagggcggttgagtccaagggcttgagaagttcgaagctgcaaagaagttcgccagagactgacatgatagcgccccaattatcgaattcgccgcaatactgtgaaaagtcaataagagtcatagtaaaacacgagagaagagaacctacgttgggagcagaaaacacagtcaccagaatacgatcctggtagaactcatatccgtcctccaccaccatgtgggcacggcagaccaggtcgaagtcgtgacgctgcaaaaagtccatgatcaccttctttccgaagcagtagctgacgccacgctcattaggttcccaatcttcctccatatctgccgggtcactccacacaaggtcgttcaacagaccatagtccggcacgtcggtagggcgagcgatgccgcgaatgtcgtccatgtgcgaaagactaggagagagaccaccatgaacacagaagatttttccggccacaatcgcagcaatcggaagacaattaaacgtatcgatgaaggtcttccagaccttgatgttgcagcgacgcttgcactcatcatagaacccatacacacgggtaacgttggcacactcatggtttccgcgaagcaggaagaagttctcggggtatttgagcttatagcacatcagcagaaggatcgtctccagactctgcttgcctcggtcgacgtagtcgcccaggaaaaggtagttagcagcgggagggaatccacacatctcgaaaagtcgaataaggtcggtatattggccgtgaacgtcgccgacaatcttcacgggagcagacagttccaacagagcaggctgcgacaggaagagctcgcgagcggcggtacagatggcggtaatctccgcattcttcaggcagactgttttggtaaccttgctagaataaccggcgtccaggagtcgcgaaatcatgtcgtccaaatcaatggatttcaaagcacccatacccattccgggagatccagaagtctccagaggagcgttcaagatgaagtccaaaatgggattcagctggttctctcgcttcatcagaattgattcaccagcaaccgcggaggccccggttggggggccaccagtgggagggttatctgacacaaggtcgacctcgccgctctgcttcatcacatttacatccttgtgacctcgttgcagactggtggaaagcgagggagacggtgggggttggggggtgccgggtcgcgacgcgtcctcggaacccggcgaggggaggccggcattagagccagggcggcttccgacggacttgagggagcccgcatcggatttatcggtctggctctcagtacgggagagagcagtggtggagccccgagggctatcggagctgcgggccccggggattttggatcggatcgagccgcggaacgagcggagagactctttggtgtcggacttggaaaaggaagggtaggactgcagagtgtcgcccgaggcgttgcccttggaatgcgactgacccatcactacaaggcttaactgccaagcttgagtttgcgatggccgcaggaacgatggaagtccgaactgttatgccaagaaacccctgttgtgttgctggaatgtcttggcccgagcttctgcaatgatacaaaaagcttggagcgactctgcaagtgtacagcgggttgtgtgcggactgtttatcactaatccaactctgatcggaactctgatcggaactctgaggaacgctgaggaacacgcggaaggcaagtgcgagacgtgaacacagttacaagacgaatgaaacggacgagatggcgatgtcaaactgcagatccaggtagcggaccagagctttgatcactgatgcaggtcgatcggttttcggaatggtgacaagctaaaagataaaggcggaaggaggctgaggaagctctaccgaaagttagtctcttgcacgagacaatgcaggtgcgggattgcagggctgactccgcagaaacccagatggcatgtggaggtattagtgagatggaaaagaagagaaaaggcaagggaggtccttgaaaggagcagaactaggaatggtaggttcgcgggtagaggaatgcgtcattatgtacgggggggttgaaagggtggtcgtccacgtaataggccacagacacacccggggatataatttacctccaagagaatccaatgggatgagatgtcacagaacagggcagaagctccctgccagagtgaaaacaagaaaagtaagagggggaggaaagttgcaagtcaagaaagtcaagggaaagtcgtagagaggtagggaaaaagtactccgccaccgctagcacagcgaaaaggtactttccgggtacaacgttggctgtttctgtggtttccgtttcttgggccggtctcgatcgggctggggggattaggtcagccggagtatctgccgggccgggatatataaagaactcggacagctgcctgattgaggaagcgagtcggagagagtctggactgggagagtcggcgctctgatatatatactgaagatctatggattcgggggtagtcaatgatcagctttaatcaaaaggttatttatccttttgggttattaaactaaaactagtgtctggagcccccaaggtctgtacggagtatgttgtatatctatccctttaccgcttcacaccgcacaaatggaaatatcttctttgtcttgtttcttcgatcttgtgacccctgactctgaatatctttttaatgtatcatagtctaggtcaatattcttgtgttttttggctgtcgttatgtctttgggatcacccacttattagcgctcgataagcgacaattctcctacaacgtacatgcatttacatttgcatttgggccactgaaaatagccgtcacagatgcattggtagagccactcaaacaccaagaatctttttccgaatctacccggccactcgcaagagaatgtatccggagcttggaccccaccaccctagggcgagtcttcctatcagaagtgatggagataaaaagtggaacacccactgactcaaggactcaaacaccgttcaaaaacaaaatgatacatcacaaaatattatacgttgctgcgtggtagggcataagctccctgcaaatacttccaacagtggaaggcggctagagaacaacagacaacaccctgtctcatgatcagattgcagcggaagcacacacgagccacatatactcttggttctgcaggaaaacaaccacgctgtatgccaagggatctatctctgtggcgaagacaccgctatttcgcccctccattaccccttgttcactgaaagcgcctaccacaaacaatctccctatccgataacttcaatgtcgactgcagattgcctgtcaagccaccttgaatgcagctgctgtgatcccggtgccacgttggcggagaagcagcgagcgccgctgcaagaaatcctcttggcagccccacgtccaagtctagtcctggcggaaagcagggaccggggtgattgtgggcgcagggcagaaaccgggcctttcctgcggcatatcgcgtgggatgcaatagatggttgtcatgctgcttgatagtggggcagtagagctaggtttatcattcgagaataggatagagaacgatccccagatgggaaaacaaaggtctcgtggatacgagcccgggtcggaacgaaaattaacgcttactccagctctattttcgtaatgtgtcgtcctgggatcacaatgaggcctatcaaccggtgtgtcatgtccaatttgaaagtcgcgctctttgcttccggcccttcttctagctctttctcgtgtgcagcggcttgtacggcagatgtggagggcatacgatattcaaaagaattggcgagaatgatgtttcggtcctgtcaagcagttttcgattagtgccattcgcggtgtgctatttcaaaccctatagcacgtaggttcatacgtgactgcttactgcatccgtacacttgaaaagcccaagaaacatccggttatccgtggtatggatccgcagtgtgcgacccaacagcccctccaagtatttaacagactgatcgtgatccattgtggttggtgcgtggttcgtgtcagcagcccaaggacctccaatgtgcgggggagttgaagtctgagggtagagctgaaaaggactccgatgcaggaggaaggacagtgtcgaattattcggggggttggcaaagttaagtaattgctcttgcagtttgggattcccctggcctggttcaattgaagaggggacgacgtcgggtggacgagatcactcgggtggacaaacaacgttgttggtgcctaaggccatttaggctaattggccatcacgctagaatctacaatgttcaaaaagctacggagtatagtgtttaaataatgaaaagtcagtatacttgaaagtagcagctactagttttattctatacgtatgtaacgttgcattaagccagatatttggcgatgtatgttcattaaaagtcaaagccgtcttcaaactatccccaggcttccactgctaaagaaaaaaagtctctcgagaaaggatgaaaaacaatagattgtaagtagccaataacaccgtgccaaaataacccaataggtatcacaaaatagatagaaaggtaatgataacctctcctgatttaaacaccagcgcgcaatgttgaaaaaggacccgtgaatggaattacatccaggtcattccttctagccagttcttgggcgcttgacccaatccatcactagcgcttcaatccatatccatgtccacatcaacactctcctgattggatccaggactattgctctcgctcgggctgtctcccgagattatttgattaaacgcctggcgacgcaggagatcttcatgggcctgcgcagtctcattggcacggggtgcaagtgcttgacgggatggtcggaaagccgatgatggctgaggttttggttggaagaatcggtgtaatgtttgctgtcgggggtcaaggacttctggtgtttcgggggttggctctaagtccattgtatccatatcggtagcctgtgtagactcctgctgcttttgggcggagaagatccatcgtagtgtgttttctgccagctgtcagcgattgaacgttgacgcgatcaagggagagtactcgggggcatttacgataaatcacttggtcactaggacgatcgtctctgaagcgttttcgcgttcgactgtggagatgtgggctcccatcgatcaccatgccccattcactaggggctggagctgacggactggtcgggagagctatgaacgaggctttccgcttgagggacattttcggagcttggtgtatatagtaaggtggaccggtaggggtttgtagaggtaattgcatatataaagtcttacagaggaggtaatgaaagagaagagaagaggaattgagacgaggactggacgcaaacacaactagctgagcgcgtcattcgcgggattcgcgttgcattctgtcgggctaagccaaaacgggtaatataggtagcaggttggatgctcataacaacattgacaacattggcaacacgctttgatatttgtaaagaaacagactatttttactcttaatagatatcgccaacctagagtatcaatgccattacttcatcatgctatgcgtagtcgcaatcattctttcggtctccaggactacaagcataacatatgtatcccaggatatacaatgaacttttgataacactttcttttaaaagttttttctattcagctattcgacccgtaacttggtttgccagtgcatatcttggtataggtacatatctaaatgatactcaaatataaattcatatgagttgactaaaatgaccaataccgcctataaaatacatgttcactacaaatcttctctatatctgccaatataaaatccaataccgatatcctccaatatcccgacgtcttccaatgacgcgctggctgttccgtgggatcccccgctccccccacttcttcaattgaagagtagagcaccacttcacatttgaccttgaccttgacctattaacacaaatcataccatgccatctcgacacgcctctcactctggatcatggtactcagatagtgcccgcaccctagcccgtcagctggatggctggctggcgcaggtgccagacacgatggagaaggtcggctcactgccaaccccaggagccagagtgatcatcgcaccgtatgtctggacctttatcatacatatggtattatgcagaacaaacatactaatcaaccaggcatgcgggctattcatactcggggccctgcgcagcctacgcatacaaggcgctggatctctccaaagcgtgagcttatctcccgcttcttctatgaaagtctctaacctcacaataggaagcgaatctttatcctgggaccgtcacaccatgtttcgctcgcaacactggctctcccgacgctaacttcctaccgtacccctctatccgatgaacccctcccactagacaccgagctgattacccagcttctcgaaacccaggcaaccagaccaaatggggcgaagattagcttcacaaccatgtcgcgctcggtcgatgaagacgagcacagcatcgagatgcatctgccctacatccaccgcttgctccagctccaatatccagattctccagcctcggaatatccacctctagtcccaatcatggtcggaaatacctcggccgcgacagagcaagcattcggagcccttctagccccttacctggcggacccggcaaacgcttttgtgataagttccgatttctgccactggggtctccgattccgctacacatactatgttccacaggcccccacgccagggccacaactcccattgtctgatgatatacttccgcaacctggcatggatgcaagcagcgtcgatcaggccgtcaagatggcctcagccggtcactccttgcgccaacgcgatcgcatctcaagcagtcaaccggctattcacgagagtatctcagcgtttgacatggctactatggctgccatcacgacgggatctgcaaagtctttcctcgacattattgaacgcacgggtaacacagtatgcgggcgccatccgatcggggtaatcatggcggccctggaaatcgtcacagcaagtcaagcagccgagcaggaaggacgcttctacttcctgcgatacgagcgtagctcggatgtagaagatattgatgatagctcggtgagctatgtctctgcatttgctgtgctttaatagtgcatcacatggccttgatggcagggcttgtctccttgcttttagttcggatattgggcattagcgctagcgccaaagtaagattgcaatcaatgacttatgagtatccgagtatccgaaacagaaattacatgggtttgacttgtccaatataacatccatgatggcatgttcacccggagccgtgaatgggatggactgtacggagtagcattcacctaaatcaccagtttcaatctatgacaggctcttcgcagcactaatcactcggctttatattcctggcttccacatattgccataagctggcactcggtagaagcacatcgacaaacgaggtcctcatctatcgtgggatagagcggataactccgagtattccgagtattccggctttgtgctcagcagattaggagatcctgtattgataatgaagggtcgcgacaaacgcctcttgacttttaggccagggtctgaaacatattaaggctgagcaccccactgtcgatggctacacttgtggatacacaccgtgcacctagtgcgttgtgaatggatccctgatctcttatactgtataagaagtttcagaatgagatctatcaaatgcctcattaccctaatcaaggaattcaccgttatcaaggggggtcaacctggaacacttaagtccctgaaattagccgctgggctgttggaggcgttattcggccaatccgacagccctaaagtcagataactctgcccctgagtccgttccagttcgactaatcagatcgcagaaaagcttctttcggtttgtttgtccagtgggaatctacgggttagagaacccccgcctggcaaagtggcactatggcagtcggggcgccagcaggattgatttttccccttgaaggcagcagcccactttagggcttgtctaattcatctattgtccgcatattccgtacaaggagtggatcttatagagaatgtggcattgtgaaacaaagcgccaaaagcatataagacttctttaagtcaagtcctatgtccgacctttgatatgtttcttttctcacttctcactccagtcgctccttaagctggatacgtctttcattcctttttatctttcacgtattccagcttcatagagtggagatattccttggctggttcttggaaatcttcaccgcttaaacagccatgttcttcttattcgtggccctggttggcctcttgcctttctttacattcgcttccccgattgcagtcaacactaccaacatgacgtcttccgatcaaaacataggaaataaactagtcttctgtcattttatggtgggttatttattgcattattaaaacctgaataaaatactaacgctatctagatgggcatcgtcggcaaccgcgaaggcgccagcgactatgacgatgatatgaagcgtgccaaagacgcaggtattgatgcatttgcgttgaatattggcaccgactcttacggcgacacccagctggactatgcctatgaatctgccgccaacaacggcatgaaagtgtttatctccttcgattttaactggtggcaggccagccagggaagcgaagtcggcgtgaaaatcgcgcagtatgccgctcatcccgggcagctcctggtcgatgggaaagtatttgtttcgtcttttatcggcgacggtgtcgatatcgacgcaatcagatccgctgctggcagcgatatcttctttgcgccgaattaccacccaggccagggcgatttcgataacatcgacggcgccctgaactggatgggctgggatagtgatggaaataacaaggctccgactgctgggcagaatgtcactgttgcggatggcgataaggcttatgcggatgctctccaagggaaaccatacattgcgcgtgagtatgagtatgtctgttcttctatgcatatttgctaattgaaaaatagccatctcgccttggttctcgacccattacggcaccgaagtctcttatagcaagaactgggtgttcccttccgatctcctctggtatgagcggtggagagagatcctacgtctcagccctcgctttgtggagatccttacctggaatgactatggtgaatcgcattatatcggcccgctgtcgtcgccgcacacagacgacggtgcttcgaagtgggtgatggacatgtaagtagagatatcccagtaaattaacaaagcaactgacaaggaagcaggccgcataatggctggctcgacatggcaaagcccttcatcgccgcctacaaagccggctcgagactgcctatcagattcttagaggaagaaaagctggtctactggtaccggcccactttgaaagacgtcgactgcgacgcaaccgacaacacaatgcaaggcagcgccaacaacgccagcggcaacttcttccgcggccggcccgacggcgccgacacaatgaaagacgaggtgttcatcgtcacgatgctgaagtttccggcgaaggtgcgggtgcggtcaggcaataatactgagacctacatcgcgcctccgggagtctggtcacactcggtgccgatgggcgtgggcgcacagagtttcaaagtcacccgtggcttccagacggttcaggctttgtcggggacgagtttgaaggatgttgtcgacacgtgtgcctgcggcatctacaacttcaatgcttatgtgggcactctgccggcagcggacactgttgacaagctgcagccggctgggttgactatgttgatggacgggttgaaggtgacgcccgagatcaacgctctgggttaatactttggttgggccgttggattccttatgattgggtataagacctatgtacagactggtccgctcacttgatcggaggtgagggttatatgtacaacatcaatagaatacaacagctggtataaccaatgttcgtcctcatttaaatgccgtgtcatcgttgaacatctactttaggccagataccgagtaccggctataaatcagcgaaatccggagtattctttgatgcagacattgctagatacaattccgtcattctataaaccgacctttcgaatgcgagtttgctattgatcgtggaatatcttcaagtcgtagtataacatgttgtagtataagtataagtaacgatctacaaatgcccgaattattttcttccgcatttccttatcttgtttagtcccagatctaccagatacaacggccataaataatccatcgcattccctttatcttcaccgactctttgcccacgttaggcacttggcgctgcccggagtgacgggaacattgcgcccgagtcagcaggtgcaggtgcaggcctcgtgaaactatttaggaacccgatctcgccgttgtctctttgtttttggtcttaagagttatcaacaatggcccgtataaaacagggagtcttctcctgggaggatgtactgcatcagcggttccagagtaagcaacgagctcctattcctattcctacgcttttacatctgaatccccaaatctaacagatctaaaaacaaaacaggcaacaaaccccctcccctcccccgccgccaaacaatagcgttctccgcaccccaactccaaagccgactcctcacccggctatcaccggagcttcggctaatgatctggggattcgtcctcgccggccaacgaatccacatagtccaatgcagcaagcagcgactcgggcacgtggtgtgtccctgtgcgctcgagcccagatcttcaccaccgaaacgccacacgcgccagaacagaaacttattctgcgagatctgccatggcacgggcatctctcagccggcgaaagaggccgatctcgtgcgctgggataaggttaagctactgggtctggccttgacttgtcggcagatgtacggttgagatattacccttcctttccttccttatcctacctaccctaccctaccctaccctacatctacctatatgatgtatccatgacctctcctctcctctcctccccatctcacccagagaaaaggacctcccccactcccaatactaatccaaaaaccagataccacgaatccatccccctcctctacaccctcccaaccctagaattcagtaacccctggaccctcccatacctcctccccacgatcccgcccgaacaccgcgaacgcatccgcgccatcgagctccgctggtccttcccgggccactggctcccgagcaaggactccgtgcgcgcggtctacgtgtccgccggacggacgcagtggacggagacgtgtcgggcggtctcgcagctggaatcgctgcggtcgttcgtgctcgtgctggagagtaactggttcagcgagccggtcgagaaactggctgcgtttttggagccgctgagcggggtggttgttcggtcgagggctgtttcgaggcggaggtgggattgggggtgtattgggagggatgggggggatgtggatagagatgtgcatatggatcttgatagggctggggctcggtttgcggtgaaggatggcttcggtgatgggttcagttcggacgaggactcttgtaagagtcttggatcggattctagctcgttttcttctggcactggggattcgacggtttctacggggagctgggagctccggcttcagggtcagtgttattatacgcatgaactggatcgcgtaggggtggatcttcggcggagaggtgtagattgctggatatcggcggtgtgagaatgctcgatttgcaaatcgcgtgattaatgttctatgatgcaatgatcgtctgttatctagacgatgtcttcttgtttttggcacattgcatgtctcggtatcacttcggagtatgttcaagacaccgttgcagatctacatattataatcggagtatcatcgatgcatactcggcatttctgaacgttattggtaatggatacatcctttagctcaacatacaacacaatacatatgtaacaaatgctaccatgttgctgtttacatattagaattccaattctcggctttctgatcttcccctatactccaccgcatggagattcaagtgagaccctgtacccaccgagaggagtcggcctataaatacatccaataaacaaaacacgtgtttgaccttataagaatggcgtggaatcaagatggtatccagttggattgctccgttacaggtacatgtatgtatttgtgttcatttcattacagaccctacggtgaacagaattatgcgtgagcatgatgatataatgtcgccaggggcaaaaatcgaactcgtctccaccggggacgctaggcgcggggaagatcgcatcataatcaaactatgtagtctcgtatttatggtgggatacagtgggagaataaaatgctagtattgaatggtacaagcccatatagagtaaaggaaatcgacccttgaaaaaggtggtcaggtatataagaaagaaaattgaaccagcgatcctgccaggacatgcaaaagtaaagacaaaatggccgcatccgtgactcgtaatgtgtcgtcgggcagttcacagatattagaaataagaaaggagaaaggaaaaggataggaagatatcgtcgtcaccatgggcgccgggcaaaatctatgaagtgaaaccccggttgtgacccatattaagtgcagaacggtcaaaatggtcgggaaaatcaggctcggatgtagtatctcagagagaaagaaaatggaaaatcgcgtagataaacgtcgtgattcgggcgtaggagagaaattgtatgatcaatgatcaggaggacaattggtcaacatcgccagccattgtggacggacaggcccgggagtctgctcgttaaatctgcggtcgcatatgcttgaatctttgtcaagatagcaatggtcgtccttctgatgctgacgtccaaaaggaatgctagcgcgaccgcagtggctttggtcaatagtcggaactaatgttgcctagggttcatcgaatgtcgctgtgcccggccagtcctccgatgcgagataggaggctgtggaatattgaatatccaggtcgcacaatcgttcgatgagtggtgtggctgatatgaaatttcagaagccgaggggttgttgtgatgccaggttaccagcaccaattttaccgtccttcatgggaacggtcgggtcccgagttaccatggcctcgtgcggcgagccactcggtcgaggcctcctggcgagcacctgggtgtttctggtcctcgcggcgactggtgaggccctgagggagcatgttgttaatctctgctgccagcgcagatgccatgtaacaccggagttccttctcttcacgctcatcctccttgatcaggcggcgttggtcggtcttggacatgttttcgcgacgcttgcgtcggatctcatggattgaccacagaacgacctcttcgggggcgcgattgcgagggcttccgtgtcgggagaaattgcggacgtagcggcgggtgacatcggtcgcaccgtcgatggagaaagccacacagtaagagatcttgcgttgccatccttcggtatacaggcgaggctgatcccaggcgccctcgcaggcatcgacatgaacccatcgccgttggtgttccgagtacacttcggtccagacgtagtcctccgaattccaaacccaacggactcgggctccgactgcgcggcagaacatgctaaagcagttggcccattcaccaactcggcctcgtcgggattgcagtaattgccacacatcggaataccgtgggaatcgctcgtgggcggtgcagctggtatcggaacaacggtacagctcgactcgggttgcgccccgggcggtctcgtcgggagtgggaggagtcatgccttgggctatcgtaggcatgtgacatttcgagcacggagggttattaacaaattggaagaatgaccccttgaaccatctggaagatagatatgttagcaagggcgcaatggctctagatcatagggaatccacataccttaacaatgctcggatgacacaatcttggtagccccattccggtttccctgccacgctggcagcctgggcctgcataatttgagattcctcctcggcctcggaatacaggcgatcgagcggaatcacggacagggcctcatccaatagacccggattttcgtacttggtcggtgtcacggatagccccttcaataaattataaaatttcagtgaagctgcatcttggggcggtgatggcatgatgggaagaccgcgtagtgctgatgaggtcgtcggctttggagagggagcggcggtaggactccctagcgagggaggtggtggcggagcccgcgttggcggcggaggaattgatgaattggacattggagatggtgatgctgagtgagtacgcgagcgagagggttcatgaagtcggttaagtcgtttggtgcgcattagctgctcgaattcgtgtgttaaagaggcggcgtcgtagccattcgagacaggctgggtagcccggtgcctgccgtccgccatagtcgatgaggaagtcacggcagacttccaagacgatgactgttgagatccagaattcctcggaattggcgaacaattcgactttgggcgaaagagatccaatttgaccctacgttcggagaagggaagaggaagtgtaaaaagggatgtcggagacgagtagtaaagaagggactacctcgctcgagttgacgtagcacacttgaagatcagggaatcaagaagggaaagaaagaaagacaggcccttggagagagagagagagggagggagacgggattcacgtacgcagtattacgagcgtcgtcagcatctggccccaatcacgggccccgcggccaagccgcgtgtgcgaaaacgaaaggaaaaagccaagggaaaagaccctttttccccgtaatttccgtaatttacgtatttttgcctcccgtgaacacgtaacgtcgacatccagattttcaatggatcgttgctagtttcttggcgttgtctatactttgatggctgaggcttctatagacatttgggacggactcatcacacacagatgattccaagactattgagggatattgtacttctgtatttacggagtacaacgagtcagagccgaaccccatccactgacgtggctcagttactaagcctttcaaggttccagccctggtcaatataatcatcacggttgggtacaatgacgatcagtaccctgagtagttcataaggcgataataatcaaagctcgtggccgatactccataaaagcacataactttgtgatatcaagctccagtccagaaaaaaaaaaaaagagaaatatcgaggagatgttgtagggtcaacgcgcggccaaggtacgaaagctctcctgtaccgtccgctcgtccactgagaggccggagacgcgcaagcgtccgtcttggcatttcacatcggggccaacagcctccgcctaagccgctttgaggcggtgctaccggcctaatcgggcttagcgtatctagctgaaggggcgcttccgaccctccttccaacctgggaaaggcatcttcatcttctctggtatgaatgtcccaatgcaatgtgagatcctaattcctgggatacctaatcgtccatattctttctatcggaatgtgaaggtgagatccatgatccgatctcccgtgctaaaatatacatcttatgatcgtgcggatcgctagggctagtccgttttccatacaacgataccatccactggaactcattctccatcgccaatcatcgttggaaccacccacgagaagaccctggaaaatatttgaggttccagcttgtggaggtatctttttccatttgcagtcgggcaagtgtcgatctacatgtacatcgtatcggccgaacccgcgctatgtatatacccaataagccggcttacatatgaatcaggggttctagttaagactgggaagaatatattcaagtactccggctctgtatatatctagctcaatatcattatcagtcatgttcgggtgcaactacagtatagaataaatatagttaggtcacgttgatttggtatgccaatcataatgctatttttaaaattcacacgctctaagatccagccctgaaatctattacatctcatgactcggaaatttatgtattgaccaggcgttttatctggggaagtcgatcagccaccgtcgtttcatcttctagccgcgtttgagcctagtgatattctgaggctatgctgggtggctgtgcgatcgaacgcctattattgttgcataagtagttgagcaatccgtcatatgtagcagaatcctggagtttttttttgactaccagatgtttctatagttctgatgccgagaaaggtgtctcgatgcttagctcggatggcgagcaatttcaaaaaaccgggtctgtcacgggaacttccaactagtcttttttttgtcaggtatgttatttttctcttctcatcggtattgacggtaatgacaacagctagagttactaccttaacccaagcaaaaggcgattcgtacgcgccacgcaaggctcatatcagcactgattctcgtcatgggatcagtgccaccaagggagaactgaaagcaattcgggcttaaccagccgagcgaatcaattatccccggacgccaagtgccaagacctcatgtgtctcttcactttattgcttggatgatattctaaaataagacacagcttattctgcaagactgttggcgtatgctatgagcttggctctgccttttttaaggtgccaagccgatatgcatgctctccctgtggatgcatattccgcgcatctagtttccacgcgtcgacacttattcaatacctgcgcgtccctccatcttttagagatctgtcaattttgtgaccgcgaaaacagcgctatcctcaaaccggccttatccccagccaagaagagaggacacgcacgcggcataggtggctcgcggtgcagctgacttcttaaggttagccttacgttggcatagttcgacgttttactccatgcggttttttgttcaactcgagagtgaccccgccggatatacgggaccatagcgttagctagggtgggccgaaacgtcatgcgctaatccacgctaactctatcgttgtcgcaagctctcttcgaggcaattttgaatcttgcattcttctacgtctaattcgttgatatggtggctcgggtcgtcaaattgcccgtgcagacctaaattttcagagtgacgtgtatgcgcctctttctatggactgttgaactactcttggttccgacgtcagaagctggtcacgtgtttatatcgttgccttatcgcatttgtcaacccttatgagctctgcatctgttaaacctttgcctatcaaccttccaccatgtcaagcagagatatgagcaggtggcacaatatccatttctacgacgcgtctaacggatagctcctaggaggtttctttcaagccggttccgtaacggacgctaacctaatctggattctcgaggatgtgttgctagatgcggcggggcattttacgataaagcatcgcatccgatggaatttttataacatcgaataagagcgttgtccctggcgactatgatatttcctgtgatggtaaggctgaccatgaagttgatggaagagtctttgacccgatctgccgggacccaaacgacccaaaccatgtcgcggacgagctcctaagatggcactttcggtaaagcgcactcgttaagaggggtccaggagctgatattcgagtcagactttccccccaggacagataaaatagcgatgctacgaaacgaaccgtatggcaaggagagatttgagattgaggtcgaactcagtcggacctagagccagagaagaagagtcgaaatattaataagaatgaagaccagaagaccatacaaactgctaactagcaagaaggtactctggaaaatcagtgggattatctgcagaggggtgtcattgtttttgcttatccacaaggggtagggctggattttactttggctactagatatcctgcgtatacagccaaacctttcactattccaggaatgtcaggtgcagcctcttcatttatttaacagaatttacccaaagaagaatagaaagatctcactgtatagtccctaggcccagcacaacagatagcagagtgagatacatatggcagtagcaatgagctgaatgtcccttcctcttcaaaagcccgagcccctccatcttcagtattcaactattgtttcgttacctgcatgcattgaactccttggctatttgcaacatagatatcgcatcaggtcataattcagtccaatgacggtcttcatcgcctctttgtgagtttcttcttcatctacaaaactccacagatctgacatagtatataccaggttcctcccgtacaccatcgatttccaagtgacggaacctaaacatggacatcgcgggtccttgtctagccatgcaaatgtcgatggtcctggatctatcgatgaacgccagccagatgcctattatcaaactcgccctgcgggctgtctcccactaacacccggagccacgacggaagacgagacggtgttcagaggatatacttggcgattagcagatgagattccgattgccaatgaccgattgtggcacggcccgagcgagccccgtgccatttcttggggacacagccggaggtttcatcagcccaaatccaaggccacagatcccccaacaccatccatcgtgagcagcagaagggagttgtctttggatggatcacaggatcgatcggacataaaatactacagtagcacacgaagctcgctctccaatgccgaatgggtcgtcaaagctgccgaacaaggtcatggaggtctacaaaatgccatccacgctgctgaaaattcgagcttgctcaagaacaagacttgggtggggacgctaggcatgcctaccgactcattggcggattctaccagaacagacatcgctgagaccctccaggacgtgtatgattcgttgactgtctttgtgagtgacaacgagtttgagggccattacacccatttctgtcgcgcggtactttggccagccctccattatcagatgcaagaaagccctcggcatactgagtatgacggttactcttgggtccaatacctcaagctcaacaaggcatttgcagaaacaatcatcaaccactggaagccaggtgatagaatatgggttcatgactatcatcttctgcttcttcccggcctcctgagggaaagactaccccaggccgagattggatttttcttgcataccccgtttccttcttccgaaatcttccgttgtttgattcaccgcgaggaactgttgaatgggcttctgggtgccgatttgattggatttcaaacagaggagtactgcaatcactttcttcactcctgcagccggctaaggaggctagaggtctctgtcaatcaagtccacctcaaccatcggtacgttagggttgtgaattctccattggggattgatccctcatcactttatacattacgccaatccaccgaggtcaagggttggatacacagcatccgccataaataccaaggacaatatctcattgtagcgcgggaccgattggatgcaccgggagggattaagcagaagcttctggcatatgagctttttctcaagacttatccagcatggagaggacgggtaagtcgagtaacatagcttactgcattttatactaatttgttttcttgtaggtggttttagtccaagtaatgtcatctgcatctgagatcccagagctggaggcgcagatctcaaagatcgcaatgaggatcaatgcaacatattcaaccatcactcaccagcccttggtgctggtcaagcaggatatcagccacttccaattcattgccctcttaagtgttgcacatatcttcatggccaccaatctgcgcgaggggatgaacctgacaagccatgatttcattcattgccaagatggacagcttagctcccataaacatggatccctgatcctcagcgagtttgtgggtagtgcctctattttttgtggccataagcttctcgtcaatccgtgggattacaaacaatgtgccgatgtgatcaaatccgcactcgagatgtcagcgggagagcagaaactcaactggaatttcctgctcgattgcaaatctccctatactgccctcaaatggcacacggggctacaagatgctctcacaaaagcccacgagatacagcaaattcgtcagacaaaccacccctctccactttcacctactgacttgaaaaggtcatatctcgccgccagagcacggatgttctttttagaagacggcgcaatcttcggtccaaatttcggcataggagagtctgtctccctaaacaaagcctgttcaactctaaaaacgctcataaacgaccccaagaacatcttatacatactcagcaaccagagtaccgagcagctccagcaagcactcgaaaaactcccctgcgagctcggtttcatcgccgagaatgggtgcttcctacaagaacccgaatcagatttatggattccattcgtgcctcaaagcgccatgaaatggcgtcccggcatcaaaagaattatggagtatttccacgagcgaactgaaggcagcggaatcgagcatcgccgctgctccctaacattccactacgacggtgcgctcgaccgcgaagtagccgctcgccaggcctccgagttagcctatcaaatcaacggtgcccgcggacgtgcggatttccacgtcgtccgcgaggcaacatcggtgaaggttgaaccgccgcatgttgctttcggaaatgggagagccgccacctatatcctagaccatctccctaatatcaagtatccggagtttctgttcgcagctggtggttctcgcagtgttgaggcgctgtttcgctgggcaaatgagttgggtgttgcccccgttgcttctcggtttgataattccgagcttgggaaaacactccatgtcaccaccgtgacaactagcacacatgctaccgaggcgagatcggtgttgccgtctgattcctcgcttttggctgttttgggtgaactgtcgagtttcacgtctaatggggaggatactgaatgacttactcgcaccgggtttgttgtggctggttactattttcattatgggactgcttgacttattatatagttttgcttgatgttcaagggggggatacacacatgcaatgcagtatagctttcaataactgatacatgctaagtagtcttgattatttagaccgacttttatatttcgagagcgtcgtttcaaatgatcaccctaatcgtctactttaaaggtaaagatacatttttattccttattctctgccacaattcatgcatagatcaaggggatcagcaatcataaaacggtagattggctctcacaactccaccaaccatagacccgattgttgaaaaaaatcagaaacaaagagagtgcaaatacagaacacagaatacgggtaggatatagcataagcaatgattaaaagaaaaaaacatgaatcataagaagcagcagctagcaaagcaaattggtcatttcatgccttgcgtgtcggagctgagaaaggggttaagaggccggagactctagggcttgtcctcctttgaggatgaggctccatcagtcgctgctgagataagggtgggtgccacacggcgcctcttcggcggctgctgcaacgcattatttggttcttccttgctaccttctctttcagactcgcttgcacgctttcccagaacgctactaccagtcgtagtggtcccattttgtggagcgcctgagataggcgtttgtggcggagttgtcattggaagagtcggtggctgcgcagagtttgttgccgtcacggacggaacagtcccgagagtgggagtaggattattcacgactcccgcaggggctggctgcgtggaaagctgtgtcgcgactgagcaggccgagttggaccgtgcgggactggctggcggtatgggtcctgtgctatttggaggggcatggctcgtcttgattggagatggcacatgtgaagacgccgaatgcgttggtgtcagcagaggtgtgagatttgtcgcaggggtggttgggtttgaaacattatgagtcacagaagttggtcctgtgtacgtttggcccagctccccaggggcgaacgagagtgaagagcagaacccatcagaggaactcatgatcaatgttaatccatcggccgacctgttgtgcgttagaaattgacacgtgggtatcaatcatagaaacagtacttaccaggtcaagtcagtaaaagtagcaaaatgcaaattgctgacgatacatagcggggtttgttgttgtgtgtcatataccaagacagcatcttgagtggcaacagcatatacaatgcgataaggaagtgcaaagacgggcgccgagctgtggtttgcttcattgccgccgtgctcggcagcctttggggatggctgaagctttgatgaatccgccgtcgttgaggatggagggactatgtggggttggctggtgaagggtggatttcccgataccacgggctctgggagggacgagaacatctcctcgcctgaagatgtatcaagggtgatgtttttcgcaggctgggtgccctgcttcaacgtgtaaaagaccggggagcatttgacggctacagatggcttcttgtgtcctggaaggtgagagatcgggggcttgttgaaaccagcccgtgtgtagacgtaaactgtgttgatgacctcgtctgtcgtctttgtagaatccgtagctgatacgtgactggttttgaattgaccagctggtgtaaacagcaggcttccgtcaggagcaaaggtcagtcgcctgaagaaagaagtaaacgtctcgttggcatagatactggcgttcttgacccccaggccaccaagacttggggatgagacttccaacggcttaacagcgggcaacgggagagatggagcaggagacgcggatcgccggatcgaaggagacgagccgaacgaagaacgccggctgtgtgagactggaggaggatccatgggtagattggaagccattggtgtccccggagtcgagggagcaggcgaggcaatagcaatggaatttgcagtgcttggttgagaccggctcgtcacgtctggaggcgcaggactgctagatgcgatacgtttggcagggagatccatcttgagcactttcccatgcggtgtcaatgtgaattgtccatccttagtcttcaatgtataaatatgaacggatcggtcggacgactgagtcgcgacaaactcgttaagcggatcccatgctacaccctgaacatagtgagaatgctcggcaatctgccgtaccatttgccctgtattcgatcgttagcctatcgcgttgtatgagaaccgttcgagggtaactaaccagtctgggcattgtaaatccgtgcgatgttgtccatgctgccagtaatgataaagacaccatcaggagaccaggccaggtcgtagatctcagcgccggacgagcgacacatgtgcttcactcgccaagtctctttatcgtccgaatgatcttcacccagagcttgcgtttgtatctccgatggtacccagagtaggacatttccatcgtctccggcagatgccagcatctcacctacatccgtcagacttgcagtcatatgctaacctggagaaaaacacacctttcgggctgaagcggaccacattgacggcttgtgtatgcttcatcagagtactcagataagagacttttctttcctccccggtagactcgactttccagagctgtagaacatgtcagatcaaggtatgcgaagggcgacggagggcgggttcatactcggacgttattgtcactaaaaaaaagtagtcagtaaaccgttcaacactctgagagaacagatagaacgtactttccagccgtagctaaccggcccttgccattgggatcgaaatgcaccgagtagataggggcattgtcattgtgccatgagatgagcaacggggtggccttcatggcgagcgccgcagctcagtgtgttaagcaccaccggttttcaagtaaggtgatatgacctggagagaaaagagagaatagaggatttccgagtccaatgatcaatcaggtatctttttttgccaggtgatatccggggtggttttgaattggagaagatccagttgatctaggtcaggtaagaagacggaggaggaagtgcaattcaaatatcaatgggaggaaataaaaaagatgcgacaaggggttggggacaaggggagagaaggttaagggaagagagtcgtgattcttcgatgatgcttcgagttgtttgcggagaacgcgaccgacggcaactgacaccgggagagggttttgttgacattgtccttttgtatatgtttttgtacgtattatatagcattttatagctattgggttattatatctattagaaatgtttatgatttgaatcggagtacggagaagtagatatccagccctagaggtaagcactaggagcagcatttgaaacagatatcaaagttagaggaacgtgaacgtaatcagtctcaaagactatttattggtctatacggagtagaaaagagctaactatacaatgcaaagcaaccccaacgcctctccaagtcgccatttttcaaagcagaatagcaagtacaagcaccagactctacgacagccactttccgagtctctctccaaaccagcttacagctctctcctgtcgcttctgtcgagcatcctcttgagactttatgaagggcgcagcctcctccgcatacatcttgtgctgctcccgctgcgcgtagtgtgcccgaatttctaactctcgctcatggggtgtgagcttctctaatggcttggacggtttgagctctgctgggattggctctcctccaggaatctcaaggccgacttccggggtttgcgatggcttatctgggttgaaaagcgacgtgataggcggtggcgcgattccagcggccttcgcatcgtcaactcgcttttcatagtctagcatctggtggtagagtttgtcgccatgcatttgaatacgctcttctttttcggcgtcatattcgaaactagatgcgtaaccgagtgcttggaggagtttctgtttaaggaaacatattagaatcgacatgatggagaaagctatgagttccagcaccaactcacagtctgggtcatgaagcatcgcgaaaaggtggcattctccgccgagcacatggtcagccgggcttcaatttgcttgcgccaatttccggtctggaagcagtatgtcagggcttcatgctccaaggcacagttctccattgctgctcgttgcactgtgtcgccgcgctctttgtacttttcaatcactcgtgatgccacgccgactccgggttgttcttcaaggtccatcggcggcttgtaggttttccacagataagcgtaacggccatctgggtagagtgatgctgcaggaactttgggcttcgagggatcggacggttcgggcgattgcgcgggcgtggagggcggcttcacattaggaccaggcacatatttgtcgggcttctcctgttcgaggtagtcacgaagcccgggatcgagcttttggacagtgtcatttttgtcaccccagagccaacccatttggaaatacttgtcgagaataaccaagaatgtgcaatagctgaagagttgaagattgagaacgcggagaagtcggcacaaaaaaggatcggccccgatagccttggctccgaccgtctttactcctcaactaccaacacgacgcgtcttttcgacgccgttcctctaaaatggaagcctgtatgtgctgcggtgaagtgcttatctttgtgtgaaattgctaacaattgacagcgcgagaggagcggcagctaatgcgccagcgcggagctgcgtacgcgccttgtctataccccgcggaaccataacagaaactgacttgctcgtttaggacgcgcaaagcaagagaggtcaattttgggttctcatttggtagcccatcgctcggattatcagcgactgcaccacttgcgactgtccctgaagctcagaatccaccgcgaacacagaccacgccggacacaacaccacgaccgtcaaaagtatcgcaaccaggatcgcaagccccggcaattgagcgcacaccgggaagtgcgcgcaacaagctcccagaaaggccctcggcatatgacgtaccctcctcggacgatagacctgaacaaacgcgaagtaacaagaggagaaagatcagtatgctaaggaccaggctggtgtgctatgctaggaatatgcgctaatgattactaaggttctactaacggatcagaagatactccttctcgttcgaatggcgggcgatctaggaatggcgatgcacagtctgttgatcacaatgatagcacagagtctcaaacaagccacatccaggaacatccagatacagatacacctcctccatcggaaattcccaaggaggtttctccacagcctctcgtcttacccattccggagaccttagtcgaagctcaacccccgatagaagaggggaccaatagcgcggaaccaacaacatcagccgctgaagagcacctagcccaaggcacaacttcagtgtctagccctacggcgcctgaacaagctgcagaaccacaagcgccactttcatcgcctaaaggccaggccgagcagcctgaaaacacaaaacaactacgcgagaaacgacatagcacaccacgggtcgaggaacgaatcgaaataatcaagacgaatcaacaggctaccccagaaactgcttctccaattgttcagacagatcaatctgcaacaaaagccttatcaccgcgtggtagccccgccgaagctcttgaagctagccatgcgccgactattgagggtgatgttgacatgactgagcatgtttcaccacccaaagataatgtaccagaggaagacagccagacgtctcaattgtcttctacggagatgaaacaggctcagcagcatcaatctaccgcgaataagactccagaactgcacgttgaagcctctgtgcaggagccagcaaccgagacccgggatgagcccgcggtagcccaatttgagggagccccaaaggctaaacggcctcgtggaagacccttgctcaacaagaagaccattgaagcggtcgagactgagaagatctcacctggacctatactagatgtcgcggagtcctcttcggggccgggtcgcaaaccaacatcacaaaagaatgaccaaccggaacctgtggtagaacctgctgtgcccaagccacagcgtggtagacctgggaagaaagcgaagcgcgcagctgaaactgaccctgaaaccgagcctgaacctgcggcagcagaccaggcagaagcagagataaattctgcagccccccctgggaagaaatcgaaacgcatggctgaagctgaccccgagcctgaacctgaacctgtggcagcagaccagccagaggcagggccagaatctgtggcacctaaatctcgtggccgacccgggaaaaagaccaaacacatagccgaacctgagcccgagcccgaagcggaatcagcagtatccaagccccaacgtggcaggcctggaaagaaggctaatcatgcaacggagctggagcttgaacctgccacagaagagcagcccgagcccgaaatggattctgcagtacctaagactcaacgtggtaggcccggaaagaaggccaatcgtgcgatggagcctgagcccgagcgtgtggcagaagaccagccggagcctgaggcggaatctgcagcacccaagccacagcgcggcagacctgcaaagaaggctaagcttgcactggagcccgaacctgaacccgagacagaataccaacccgagcctgagcctacacaagaacagcctcgtcgcaagactcgagcgcctcgtggagaaacagtcccggtcaccgtttaccgtctcgccaatgtcaattctctaggtggcgcaacatctacggccgacgggtctggagatgaagaagaatccgccgatgaactcaccacgcatcagaaggccaagatacccaaccgcggcggtgtcaacccggccgatgtattgagccagatctgccgtgagactctagagaaaacactaaatacactcaaggatgggattgcgaacgaacaaaataccacgcgacgtgcggagtggtcgcgcaagagaaaagccgtcgaagtatttggctcggagcttgagagccgcctcatggacctaagcgggatactcgatagcaattttgtgcttggtgtgcaattgaagaagactaagcgggagatgatggatctacggagtcatctataccgggtccgccgagaacgcgagaacatagctttgcagatggatgcggtgcgcagcagacacattgaacaggagaaggccaactcggtgagaacgttccctaacagtcctgacgatagcattactaacaatagttcctagtcacgatccacgatcagcaattcccttcacagccttgaattggccctcgaccgcaacaagcaacgtgctgcttctgctgcggattcttctacagatctcgaatacatgctccgcaccgtcgccgacgtgagttcccgggctcctggagcacaaggcggtctcttaaatcaaatccgagcattcaacgcacagctcgaagccaccgttgatcgcctggagcgatgatgtcatttttttgttgtctttttattcatccgttatgataccaggaatcattttttgtgcaatgaatatagtccatggctgcgccagaggatggcgtttggcgatattttcacctgtacaactcccgatgtgatcgagtgcataggtagctccttcttgttactttcagctaccattgaatgtcagagagacggcgagaatctccaattcttgatgatctgctattctacatgatacacataggtgggcaactctacagtgtattattaattgcacccctgtcgggcagtggtgccaccgggacaataacaaatcagacatgcccacttgctcctatcgcgactagtgagagtgagacttgctcgatctcatgttcaaagacgttatggtctcggacacttaaatttattgcttgttaatccaagtggagacccttggaagttctgcgaagcaagggaatactgatacttcgatcaaatgcaagatataaaaccacggccattcacccaaaatgtattctaacccccagttgaaatcaaatacaatatatacaatatatatcctaaaatgaccaaactcttcactcccctccacgtcggccgcatggagctcgccaaccgcatcgccatggcacccatgacccgctaccgcgcctccgacaaccacgtccccctccccatcatgaaagactactacgcccagcgcgcgtccgtcccaggcacgctgctaataaccgaagccaccacgatctccgcccgggccggcgggtacgccaacgcacccggcatctacaacgacgcgcagatcgcagcctggaaagaagtcacggacgccgtgcacgccaaaggcagctacatctacgtccagctgtgggcggtaggccggccagccaacccgcagctcctacaagcggagggcggatacgatctcgtctcgagtagcgcgacggccgtgagcgcggacgcgcccacaccgcgcgcgctctcggagaccgaaatctacgcctggatcgcggactatgcgcaggcggcgcgcaatgccgttgcggcgggctttgacggtgtggagattcacgccgcgaacgggtatttgattgatcagtttacgcaggatatctgcaatacgcgcacggatgcgtggggaggtagtgtgcagggtcgggcgaggttcgcgcttgaggtctcgcgcgctgttgttgaggccgttggtgctgatcgcacggggattcggtttagtccgtggagtacgttccaggggatgcgcatgaaggatccgaagccgcagtttgagtatctggcggtgcaggcggctaagctgggacttgcttatgtgcatttggtggagtcgagaattgcggggggtgctgatgttgatgctacggatcggttggatttcttcctgcgggcttatgggaaggcttcgcctgttatttttgctggtgggtatgacgctgagtcggcggttcgggcggttgatgttgagtatgcggattatgatgctattgttggcattgggcggccgtttatttcgaacccggacttgccgttccgggttcagaatggcattccgtttgtgccatatgatagggccactttctatgtgcctaaggaccctaagggatacactgattatgcgttcagtgctgagttccagaaggccattgaggcggcggcttgatgtcctgattgtttagcgatggttgtgtaaatcattggatgtatagagctagacttataacagccctagaggacctagcatatatatattagtgcttgaacataatcaaattcactccaggctgtgttggtgccgagataccagattcccatttcttagagtaggttggctcaacatgagtctcctaatcaaaagcaaattgaaccttgcacgagtaccaacacgtgactttgcaaaacatgcgaacctgagccctcataaaaaaaaagcgggggaaatgcagtatatacaggaagcgtatgcaccttgtaagcagagctcggtagttagttactccgtattccgtgattatgttaaacctaaaggatttccccacaagccggttttaccaaaacgtgtgttcctccgacttggcacggagacaaacaccactttggaaaagccgagaaaatgttccggtccgccgagccgaaaaatccaagccgagggtaaatcgacacgttggtagcccataaccgtggattctacacgtattggggtaggtatgtaatggtttttgtgggggatcagatcagatgaacgaaaatgtggggaaaaagacgaacgccattcgccaagcaacatcgtatgttctatgagtaatgtatatcctgcactatggaagctcgtatttcgatgtgcagcactatgctctttagtcacgccaagtccccggggcatttgtatctcgaattagggggaggtagctgggctgaaattggtccggagcatccccatatggccaattattgatctgtgcatgatgacatggggaaaggttaaacgaggtggctattattggtcaggaagaatataagatgcccaggtgtatggtgccacctttgatagcagagtttgcgctcggatcaggtctggatcagaggaatggatcaaattaccaggaaacaggaagaattagcaatgattgcacagtttccactcatgtctcataaacaaaaaggcacgatccaacatgaagataagctataaactctttaagggggggaagttaaagggccacttggccaagaggattaacgtcgcattgacttatggagtacatacatagcaccctgcaggtaatctgtggcgtgtgtgtgttgttgtttattattattacttggcgtacgccacaactccaggctgttgcccggtatgtattagtgaagctgaaaaaaaaagaatccaggtccttggcacgatagcaacatggaagcaataagaaaaagatggctattattgtatactccatttgtacggagcacattagtcctgaatccagcggaaatctctgacccgggccgaatctcaagttggtacggcgtacgccgtacggagcacagaacctccgtatggagcacggctgatacgtccaccataattagccgtaaatcagtgtggagctgaagcttaactcgcttgcactttctacggggtactttctggcacatgacaagcttacgaaagaaaagaaaaataaagaagaggctcgagcgtactaggtagtacgccgatctaggttccccccggacaagggaacacgggaagagggcagactggttcggctatatctttatttaataggtcaacctggatatggcatattgtctattaccctgagacttgagaagcacaattcttaaactgaatgtgaatgacagcatgcgatgtctggtacatcatccgtggctagtgggtatgatatgtgtatcatgcttcggtctcaaaaaaggggcaagagggggcatattatgcgagacccgcgctaagtggagaacaatggatagaagagaggacaataatattaagaaagatacagagtatggtgtataacgaccacagcttaccaaggtgactatatcttactatgaattcattagtgcgtaacccctaagggtctactccgtacatccacggcgaatgcagaataatgattgaatcatataatccgtcacatgggcaacaattggtatgaggcaaaatacattccacaattataccgaggtcatgacgcagtctcggctcggtgtactcgataccgggatttaccaccggctcagccactatcagcaagtatctgctacctgttgcttgctttgatttccatttgcactaaagtactgtacatatgcacgatgtacggagtaaatcaatactctccatccggaatagagtggactggactctacatgatagaaagattaatatctccagagtccagtaaatttccgtctatacaactgctaccatgggacctacagcataagaattactggaacgcactccggatgctaacgtccacggggtacataagcttatggaattatgcatcaggtaagccaagcattggagtcaggcaagtcagcaaaccctcgtttattctccctccaatgataacttcgttccccggatatcccatctccccactttcttccccgggctagttcttccattcatccatggatccttacctgccaattacctaacctgtgaacggtcctccccccattcctccgtgccgtccctgcatggctgatttgatatagttcgttttttacccctgtgaagcgattcaaaacaataggagttggatagttatattctgtataattatatgagacattcccctcccatctcatctttttttcctcttttctccactttagcacactcgaccagactcttatcaaccgtggaaccggtccataagtggagccttaaaaacgggtctgcaaatcattgtaatattaccgaaataccaaaatacctggtaagtttggttccaccatcgcttcccagtttttttcaaatctgctttttttgcattcactccaattggagagagtataatagttctcttccccttccccagcttccttccccggtttcctttttcttccccagcttcattgttctatatctctagcccagcagtgctgtgcttcaatctcatatacccctatacctataacgtgtgatacggctttacataacggtctacctcttttaccttcctctttttaacgaatcagattcattatgtctgccactcaaacaatggaccatgccgcattggagaaggatgcgggtccctctcctccctctccccagatcagctctggccagaacggcgcccccatgcagcctcagatgtccgtcgaagagcaccaggtagcacaagcggccgcgcgcttcggctacggacccctggcccaagtcaacaacaacgaacgatccctgcctcccttcggtggtgagttccagcccggtctgtacaagcccgtcgaaggccgcaaattcgccaatccggctcctctcggcctgtgcgctttcgcccttactactttcgtcctgagcgccatcaacatgggcaccctggatatctccagccccaacattgtggtcggtcttgcttttgcttacggtggtcttgttcagctgctctctggcatgtggtatgtagcttccgtggcctcggcctgaggttcccctgacatgagatctgcgactaatacgcgcttctttactagggaaatggctgtcggaaacacctttggtgccaccgctctgtcctcctacggtggtttctggatcgcgttcgctatcgtcttgacccctggtgggttcgagattggtgaggctctcggcgagtcaagcagtgacccttccaagttctatgactccatgggtctcttcctgctggtaagtgttccttcttcacaagacatgtgcaagaaatcatcccgctgacaatgtaacagggctggttcatcttcaccaccatcatgttgttctgcaccctcaagtccaccgtcgccttcttcatgctgttcttcaccctggacctgaccttcctcctgctcggcatcgcctacctgcagcgcagtcccgacggcagccccaacaccaacgtccagatggccggtggattcttcggcttcctggctgctttctcggcctggtacaacgccctggctggtcttgctgataacagcaacagcttcttcatcattcccgtcgctcacttcccctggtctcccactggccgtgttcgccgtggaaagaccgaccgtgagctcgcataagcgatttcctttttccttttttctcatcggaaaaacagccgggatgcgaagtgtccgctttggtgatttgtaatgttttttgatacccagcgttgtatgtgtaggcgatagactgagattccatccgccgcgttctcatcgagttgtcgattgtgttccggtttggaggcctgtctgttcgcctgtgactgttgtgtgcatggatgatcgatgattctgcactagtgcagttgcaaaaaaatcttttgtccgagtcgattgatgctgtttgtaatttttcgaggagcaccgaggtgatttcttgtgctttctgctttttttccttgctgtatttagtctcttttacctgcgagtttcttgtgactcagtaattaaatcatcgacattgttcacaataccttccttcatcttgtagattgttgtccttaggctactaggtgaagtcgaattcacaccagtgcttgctcttgtccgggttgtatcgcagacaggctgttgttgggcttgagacattgtatatcctcatcagatagtaacattctgcgcaagaaaacacctgccaccaatcatccaagcatgtctggctagtcaagcaccccgacctaggaaggccaagaggctgacaagccgtccatagcctagtataagattcatgtaaggatatacattgaaggtgaacgaggattgaagacaaaatcccaatatcctatagtatgggccaaaaaaaagtttgtttcaacagacgggagaatgaaacaggggaaaaaggtgccagggggacacgggagtatatagataccgccgaaatgagtcttttagggcctatttacctcggacctctccctctcatgcccagggatcaagccacccgagagtggagatgtctgatatcattcggaaatttctcggtctgcacgacttgccaccttgaagttgacaataagcataagccaagaatgtaggattctaattcacaccggttgacgcaactacatcagatcatgtatagatatgtcgcataacattctcctacatacctccttttcgcaggaagtatacgtacatctggttggaatcggttggaatcgcgagaaaaaaaaaaggtacgcaataaagcgggaaatgaaatgatatcgggaaaaaaaaaatcacgcaaccaaagccacaaagggccaagcaatctaggaagagctgcctttctatattgtatcgaaaatcgcgcatcgccgagtctaagccgatctttgcccggctgaagttcggtgcacgttcggcgggcggtttctacagcgtatcagcttcgtcgagcctagggagtgccggagatttttcggatttcgggatgccgaggttgggtttgtggactgatgggcggtttcaacgccgggaatggatgtagtatgtcgggtttgatcggaattgtgtgcttggcttggcttggtggcttggctgttttgaggttgggaggatatatgagctggagggattgggtaggaacaaacctggcatagcatgtacatttagttccagggttgaagaagtggtcaattaggtacggagtagtagatagatgggctgtagctgtttggagaggagtagtcgtgaatcattggaaatagaatatatacattatatcttcactcatgcgtagatagcgagaagtccggagcctggaatatactggatggaagcggttgtatataaccgacttggatgggttcgatctattacggcagagccatgtagccaggttcatactggcgattctaccagcagttgacactcatcccagatctgacgaagcataggcaggtgaatgcgatcgacatagaaaaagcccagcaagatagaacgggcctcctgccaagagtggattccctgcagccgtgcagcattggccagttcagatacaaaaaaggcccgctctgacggcagggttagactgcaagccgcgcccatgaaaagctgccagaggagcaggtcgcgacagagcgcgaataagcctgacgggatggtcgcctcgagggcaatgcgcagagcctggattggcttgggcagtaactggccgatcattggatagaagttccagatagcgctgttgtggaatagcagtaaagcgagacgggtgcagccctcgatggagttgtcgccctttacttggcctgtcatggtgtatcgatctgtgtgtagttggtattctacgtgcagcacttctgtgttgaaatagtcctcggtctcctcgttaaactctttgtagccggtgttgcctttgatccattctgcataccaggatagttcgaggagatcatatacgatctgtgccatgggttcgccgaagatgcctggtattttgagtagagggaaaaggcgggtggaaagtaatgctacgtcgtcgttgggtggaatgagagagagtcgcgctgggcgagtgtagcggacaaaggggaatataggcttggcgtgagccatgcaagcaactcggatatcagtcctaattgcgaggttagcaagccttgcagctaatcatgaaggaggatacgaaccatgagatctggaaccgcacgtctgaagggacatcgtcaaagttcttccgtagtgcgatcatctgtcgcaaacctgcaagatggattttgaggtaatcgggattccccgacgcgatctacaatcatgtataagctttagtaatcgcaagcttggtgcgcagaatatactcacttcaattgtcaacaaggtagaaactgcagcaatcagaacatcgctagaagccttgaccgggtctgacaggccctcgttgaccagccgaatagtctcgccacggtggtggaacgtgtcgatcaccaactgactccgcttttgattcggatctcggatgggtagctcgcctgcacgcatagcatcattggaagtagccatgcaaattgtcgcatgcagaatggccgggtcgcgttggatcaaggacgcccaatgagcctgcaacttgggtttataccgcgtttgcaatggatgcgcttcttgtgtcagatcccagaggactatacccgtgtcagtatacgagctcgaccatatcaggatcggggtgtaaacactcacagactcgcaaatgtcgcatcattctatctgtgagatgtgtatgtccagtatgaaaaggatcattagctccctgtcccaggtaagaccatgcagagggataggccaccgccccaccaaagccagagtcattccatgatgcggcttgcatagcagggtatcccacggctgttgatgtcacaagctcctcgacctgttctagctcttgttcatctgagatttgactgctagacaagttgacagacgaaccaatacacgaaccgacaggcccagcggtatccagtgccccggtgttcgtcgtcgtcgtcggctgacaaggcgagttcttccatttgcttttattggactgctccccgttccccattcgcttcttgcgattatgttcggacatgacatgggaccgaatccgcttcaaggtctcatccgttgtgcctgccgctgccgtttgttgatcactgttgacccagaacaaagtcgatttccccgtagatgcattgtcggctttgcggggtttgcgtactctggtggttgttttccgactagacgccttgggtgggggaggagctggtgcaggagctggtgtaggagctggtgttgaggccatggtctgtatagggtgtatattgggatcgaagtggatgggagctgcatagggggagtggatcggatcggccgcccaagccgcagccgatggccgagacagcacgggcaaggtctgctcgtaacccggtaaaaggtccttggcatccatcgagcttaattagacgttcgaggcattacctatgtaggaggagggagacctggaggttaagaggaggacaaacttcctttccggaccggcggggtagaaatcacaggaattttggattcttcacattgcagaacgaatcactggccccgctaagagttctagtggaaattgacaggtttgatttagatgatttaaggggtttagaggatttaaaggatttagggggatttacgattcgtttgtttgttcttttccgcccctttcgaggactacaagtctacaccagtcgcatgttccaatatccacttgaccttgagaatatgggggtatattcaccgagcttgttctttttaaggtcatgtggcgttgaaaaagagtaataacacatgtgtatgtaggtacagggggaacctcgatatcgtgatctactatgatcagcacaaattcatgaaacacgttgagatacacggagacaagccgacgaagtgtgtatagatctgcattttggcccctgaaaaacatccaacggtttagacgtcaagtcaagattttctgcccctgacagcactagccttacatttgttaaagtgggcatcgcatagcccgagatgaagttcaattgctttattggagtacagaatgcattaatattggatccgagggagctccccaaggtatgtagttacttgtaatagtatcgaagagctagctgtacaacggaaatatccgtggtctactcgatgtggaggcgatgtggggagcaagtgagatagaacgaatgagatagtcaagtgaagataatcatacaacggacgtcggtttcattccgacgccgtgcagatcgtgttgcgcccccaaatttaggtcataccggggcgcgggaagatcggcatcgtgtccagctgttctaacccacccattgtaccactctgcccactgttttgccaaccttgtccggtctgctgattgataaactggctctgtcggaaagggttggtgctgccagttgggttaggccgcaagggagctgctgctggaggctgcagaccttgctgcggagcaggagaggctcgcgcaaaaggattggttcccgtccgctgaggctggatcggctgcgcttgtggtggctgaagcggtacttgcgggggttgtacaggctgaaattgctcgtttgagggattatattgcgtgtttgctgtggatagtcgtctcgcgaaggggttcgtgttctgtcgcgatagaggagcggcgggtggctgagcacctgtatgagagttgagcatcattgactggcggaacgggttcgtgtgctggggttgcaagggctgaagtgcttgctgctgttgctgttgctgttgctgttgtgggaaggcggcaatgccttcctgcggaataggagctaattgcgactggaagccatatgaatgcggctgtggagagtaccctccaaatccagcgccagttggcatagcttgaagcggctgcggcggcggtggctgttgttgttgtagttgctgcggctgcccaaatggattatttgggccctgtgcttgataaggcactccatattgggtcggctggccatatccagttgccaagggctgctgctgaatcgcctgaggctgctgctggaagccagtctgctggggatagaaaggttgctgcggttgctgttggaaccctgtttgctggtattgcattgagttctgttgccccattggctgcgggtcaattgaatcaaaaaagtcgatcagatccacagctggcggcttcggttgttcggcctgcttgggtgtgtttgacgccggcgggtttgacactgggttcggcgcgggctttgatacatctgtggtcgcactggcttccatgctcggtggaacgcgaacgcctttcttggccagatactcccgccggcgaagatcgaaatcaggatcgttgagatcatcttcgagaaggcgcgccaaatctgtggaggcatgtttgagcttcggaatttccaagcgagtagcagactcgaaatgtcttgcgactcccaaaaactggaccacttcttccgtttgttttgtgaatgtcttgtagattgccaaggcgcgtacactatccggccgcgacatctcaaagtagtgttctatttcggggttaaaccaatgccgatcaatggaggagctgctgacttacctaaaacattaatcgtaccctcattcatgactgaatatagagtcaatagatcaagtgtgaggagacggaacgcggtcagactgatctcgttctcgggctcatccgtcaacaactgtacactgtcagtcaccaataaaaggcctgaattcggaattcacccacatcacatcgcagtaacgcacgaatttgcttctgtacgatttccgtctccctcaaaaggcctttatccacacctatcctcttcagccgtcccggtccgcttcgtacatggtccgtcttgcaggcttcgaacgccttggcacgcgtgataaggtattcggcatatcgtcggatattatgcccttgtgattgggctataagaacagtcagtagactgcaatcacatcaatatgagggaactactggtctaaccttcagagaaattgctgggcgtgatcttcttcgggttatcggacaggtatcccagcgcagcatcaagttgaccctctcggatcataagatggagcacgatgagtgccttgaaaacaatggtccatgccgagtctcgaagccgtatttggagggttcgaaatacctctgcgactcctgcctcgccggtatgagttgccacaagaatattctctatgtatttggatttaggggccgcaagctgttcacgtcagatatttaataattgtcgcatgtagaaaaaagaatgagctgagaattcggactgaccttgagcttcgtagccccctttactgacttctcaaatccccccggcatgttgttcttataagtcgcgaatcggcgcccactttggctcaggagaatagaagtctgttagaagacagtgggaaagactggagagcctgctccgagaatcaatgcccttatagtgtccgggtgagtcctcaatcatccgtatcgttcatgacgtggctcattgagccatgctgtgagcctggggcaagtgggcaattttctaggggatagggttcgaagtccgatcggaacggccgggttaaggattggcgagaatttgagatcactgagtgaatatgggctgagaagcaaattgagggataaggatagcaaataagataatcccaagggtgagggcaaagggagttcctgggggcggagtgcatgttcctcgaggcaacctaaattgggactagcgcatgttggcagttcctcgtgcagattagccctggagtatacgagtactatatcataacgaactggtatttagattatatatgaaagattataggctatataaactataattggatgaccatatcttggatatatccgttgatcgtaatatttgaatattgcgatttcgttcctatatctagagattatatatcacggtatccttgggtttatttgaaaacatttcgatgtagactgtggcatatcttgtattagacgatataatataatagatagctagtgaccgtaagccagccaaggagttatcattaacacagagggaacctgctttgcacaattggggaaaacaccacgaagcaacctttttgttggctttttaagatcgaattgaatgaagagaggaaagagtagatatataacatccatttcggaatacagcccactaggcaagtaaaagactactggtatttgacgtagatctagggcttcatacttgaactaaagaactatacaatactccacttatggatcatgctagaaccaagctagtcacaaaataagaatcaaggtctgaacgaccttgattctatcaattatctggccagagaagcagttatcttgtacgtagttgcctcaaacgtccgagatgggcaaaaatgtacctagaatagtgagatcttcaacttctaccttatcccaatatgttaaaggaccagatctacttttgggctgaagataggttctctatttgctagcatctttgaagaagatttagtcacatatgagaccgaagatatgtccattcccagaatgttcgagggacgggctggttattcaagtctgagccccaagagtaatttatcgtttgttatacccttctcttacttttcttcccctacccttctgactctcatccttcaaccacccctaaccccgcagacaccccaccctatgccattttcactgtcccagcgaatagcagatgaaatcaccatgatgagtctcagccgcagtcggaaacgaaccgaccagcttgaaaacaacgagtcggttgttaccagccatggaaagatctgcctctggtgtaaccgtgaattgattatcgacggaacagatggtcgtgatgaccagagccagcccactcgtcccaaccaagccataatctccaatcaaaaccaacagttccaacatagacaccaagagcaccaagaccaggaccagcaggaccatcaagaatgccaagagcctcaatatcaacatcaagatcagcaaggttgcggacagcagcatcatggcagacaaggccatcacattgaccatgagctggctatgcaaggagttccggccgataaaatgccaccattgctgtttcggtggtcaaaccgtgactcccaaggaatcaactcgaagaccatgtttgtagccgggcttttctgcaacggtgattggtttgactccgaagactgctccggggaccgtttcgagggcttctttcggagccatgtaagtaaacagaaagtcagaacccccttcatctctaccttccgatcaccattggcaccacttcaccgtgccattgctggccagaatggcgccatagtgaccgttattgacacgtccaagttggagaccaaagtcttctatgcccatccgctggctattcggaccgggacgcttgtgtacaatggctggcagggctacggggagtacctcatctggggtcgcgtcccagctgaggcaatcgctttcagcgtggatatcgtcagtcttgagggcatcacacagtcacaccgtgatttgaaccgcttggttcagatcccccttatccgcagctctctacgctgcagtgatactcttcgtgacatgctggcgttgaggagaaagtcgcccttccaatctggtagaacgctcggaaagtttttgacccttctccaagtgccaaggatccactgggcgaacttagcatctgagttcgccagggcatggggttggaggaatgcgagagagacaaaaatattttacagcggagtgaaaagtgcacctccttacctgcccgaggaattgacggactctgagagtgaggctccatggcccacacctcgaaagacgccttggcagaccccccaaaagatgcacttctcacccgactgtgttcccgacttagactacgaaccacccgagaccgacgaaaggtcggaagggacctctgagtcggaaggtgtgtccagttctcaaactatgtcaatgtgcgacaagacagagaccgcggatgatgggaacttttcaacacatgagacgctgtctagtggaatcttcccggagaacaatggttccgaagacttcttggcgcatatacatagtcaagaggcaattgacttaacctctgataatgaagatactagttcccagcgcgcattgcagcgggactggccgtcagatgacgatacatacatgtatcctgacacgcccaccaaaatccgagggaagatctcactgcactcggacaataaagccacctaccgccctgtactcaatggacagatggacatggacttttttgaaaagttccggctttggacttagcgtacaaactgacgatatgtgaaggtcacgaagaatccatgcttggcatggaagagaacattgaagaatctttgtttggcgcagctatctgaagacgagaaaaactagtaactagtcaatgtgtcaatttgcctttgtgatatagaataaacctcctggcaatgctgtctctaatatgtgcattgcgaacaaagtaaataattggcatattcatgatcctacctccttcgatatctaggcaagtaggtattatgcaactaactagtaatataaccatatatgcccgaaataatatcaaaactacgcatacagacagccaaacgacaacccatgccctagataggtatgtgatttgccattactagagaacacagattaaggtcctactggatcaatgtagacttggaagagcaaggagatgactcgagatgcgcattgagaggctttgtctagattgccatttatggtcaatcttgccctgtgccggagttggtgtacagtttccatcgcaggaggaccgaacaaatcattttgatttttgcgtggatacacgttcatgtgcgaggtatctgggacatggaaactcataaactatcccgacccccatccaagaacttcctgtatatccagtccataccgcttccttcgccttcaaaacacccggtttattaacctagaacttggagaaagacttgacagcgcgcgaggtcttggcgtgaaccttcaacacgttgaagcgaacctagagagaaattttagtcagtcgtcatgtccgtagcaaacaaagtaagctgtcaggttcgatgtcctgcagtaatgcaatagtgtgtggttttgccaacaatgacggaaattgacaaggatcactagatgaacgtacagtcttgctgagaggacggcactggccaacggtaacaaggtcaccctcctcaacacggaaagcgggggagacgtgggcagacaggttcttgtggcgacgctcgtaacggttgtacttggggacgtagtgcaggtattcgcggcggatgacgagggtacggtgcatcttggtggagactgtagataatcagttagcaagtccccctgcctggtgaaaaaaagacagttccaattcaacttaccgactttgccgacgaggacacggccgcggatggacacctgggaagtgaaggggcacttcttgtctgtaaaggttcaaaaatgagtaatctgacacggaaagattttggtgattgcggggatttttttttggcatgagtggtcttttcgtgattcgagagtttgagtgatgaatgcgaatattggcgagagagggaaacgacggagattccaggcccctcaattgctccatgcgatcctccattcgtcctttgtatccatgaaaagaccacccacccatatatatcccgccacaatatttcgaataaaaattcaacggaggtcgtgcataccgatgtagcttccctcaatggcggtcttgggggtacggaaaccgagaccgacatccttgtaccagcggcggccctgggcagtcttcttggacgaagccttagccttggtgttgaggaagatgtgaggctgcttctggaaagcgcgctccgactggacggtcaactcggtggccatttttgcggtgttgttcgacgaggaagcggtgtcgaggaaatgtcgggttggcggctgtcgaagatgaggaagattcgttgtccgttggaatctttggtaattcgtagtgtgcgacactagtcctaatcgggactaggctaattggggttagggctctgcgcttttgtttacatcacgtgattgcggaggcaacgcgctttgggcaggtgcgataggagtagattacaggctcacctgggcagtcctgtttgatctaaagatcccgacgctcagatttaccgagtatgcaaccttgaattgatctgtgaatgtgccgattcgctcgccgacaatgtcaactcgacccgactccgcggctttgcggccgccgcgatctcgtcggtctatcgctcatgtcccgcggtctaggatgacgtctagtttggacaaggagaatgcgacaactcagattggcgcagctcagccattcttgaataacacaaagcctgctatgaaagacaagaagtctcggagcaagagtttggggcctggtggactagatgccctccagaattctaacggcaatcgtcgccaggtagctatcaaacggaagaccacgggcgcatatgcagaacaattctgacttaaaatatctatagtctacagcttcttttccactaaagtctattctcaaacccacagtccctgtgtctccagtgcgaaccattccgtcattcgaggaaacgcgccgacgtacaccagctcgtagtaaacagcagacacacgacggcacgatggacggacagggccaaacagaccaaaagaaagagggtcttttgattgacttcgaaacaacaccaggacctcccacgacagataatgacaatgacgacacggcgaacccgtttgatacatttaatgcgacttctgccattcgcgaggagatggctgctactaaggagcgtgacgaacaggagcggaaagatcgagaacggcagaatatcttagagaaacgagccgcgcggaggaaatcaatgggtcagtgtgttccactttgtcatagaagtgaatattgacacagatttatacagcgaatcgccgagtatcctttgcccccgaggcaaccttacatacctggaacgtggtggaaattccggacgactcaacctcctcctctgccgcaaactcaacaagacgcgcatctgctgccgtaagctctcagaaccaacctgcccctgcctcgcccaccaaagacgctccatcttcgccagcagaatcggaattcgaattctcacctgtccgcacacaagatctaaaccagataagaggtcgcccatcatctggggatgatgacgttcaggatttgtcttctagtccgttcagcggaagctcagtaggaagcgaagacaccggcgcccaaagtctggccggagaagatgacgatggcgattcttcagactccgacgatggatttgatgctgagagcactgcaatgagcatggatgatatgaccgcgcgctcaggcatgagtgtccaatcagatgcaacttctagctcaagctctagtgccaggctcaacgaagcactacgtcaggccgcacaggaagcaggaaccgaacttgatgagggcggagagatgtcaatggaaattgtggatcaagaaataaccggtgcttttcagccgtggatcaaaaagggccaaaggcaaagctttgactggggagatattagcgcacgacatgatgaggagaacctcgatccatccaaggcggccactactcaaggttcaccagaatcagatgatatcgacgaggacgaagaccttagcatggacgtgacgaatgccgtaggacgcattcttggcaagtcccccggccgtcgccagagcacggctcgtcgccagtccgtggcagaagaatccaactatggagatcaaactatggagatgaccaatgtcgtcggtggcatcgcgcaggtggattcgccattcaacttttccgagattggcaacgaagatgaaggaatgacaatggaattcacatcagccgtcggcaaaatattgggcaaccagcctacttatgcctccaactctgatcacatgaacttcgatcaagagaatgagtctgacgatggtatggacatggagatgactggtgcaattggtggcatcctacagtcagggatcgaagccaatgacaaagtgcacgcgaagatgataatggagcttgaaaccgattcgggtcagcttgctagctcgccttttcaagacaatgttcgacagtctcctgccaaatcacccctggcttatcagattgctgctgttgcatctgaaaatgggagccccagttcggcaactatgcggcctaggcctcctcggcgtagctccaccccaggatcgtccagccggcaaagatcaccaaatacgaagccattgactccgcccaaacagtctaccccacaagctaaacctaccactccaagcaagacacccccctccagcaatgtcacatttagaagtgcttcgccaaagaagctcttccaacccgaactccagcaatcagcagataagcgcaagtctctacgccaaagcctgtttgagcataacatagcaacaggagagtcgaccccgctcttcaaattgcaaccacgcgagagtcgtcgctcttccggtctagggattgacaaagaaggtctcggatctcctcgcgtggcggccttactggacaagcgcccgtcgcttggggatagtacgccccagttcgttccgcaagaacagccccgatccggtgtacgcttcgaggatcctctgcaaatgcaggccgaggaagaacgtgatcgcgaagaagaggaactccgagaggatggctatatcaggggattgcagtcagatcgggacgtaaccccaagcttgaaggacttgatttcaaacctgagcccgaagaagactaggattggcaatcgtaagagtctccatgttggggctgctcgcggggttttgggcaagcgcccggtcgagctagacttggatgaagacgaagtggagaattcgcccaagcgactgcgtggccataatgtcagcccagtcaaaggtgtcaagttgccaacgccgatgttcagggaagccaatatccgtcggtcaattctgtcacccgtccgtagagctgctagctcatcaccccccaaaggcagcaccacgccttcccaacaaccacggagttcttcccaaacgtccacaactcctctcaatcatgggattgatgctcttcatattgcttctgatccccaacaaccagaagaagaagaggtcactcctaccgaagaagcccccgtggaaattgagtctattcagctgcaggacttcctgaaaatgaccaatattcatttcatggaactaactacgacaaagagaagacacacaactgcccccgggagtgccaccaagaagctgacacgaccttctggtgagagcatgcctaaaccaggctcgataacgtttgatgattgtgtggcagctggcttttgtaccgtgccaatgcttgaattataccagcatgtaagtgatactataccctgatactcttgttctcgctcacactgtctctagtcgtgtcgggagttgaagtcctatatttctgaaggtcggcaagtgattcgctctattgaggcagaaacatatgccgaaaatccagctctcttcaaagagtatatcaccgctcctccagatatccgagtgatcatggacaatcagttccgaaacgtcaaaacacatgcccgtctgctgagtaaggccacatggtacgaatggcggatgaagttgcttgaggggttgaaggaagggctcattcgccacgtggaggaaatgaaagcagatgacgatctgctatctgaacgagaagagttgcttaataggaacgtgccgtttctcgtggagaagcacgcctccctggaggaagaagcaaccaacctgaaacagttggtggaagagatggaaaactgtgatcaagatgagttgcgcaatacgcgcagcaagctgtccgaggtggactccgagattgcagtcaagagacgtgaacttgagcagttgcagaaggaagtccaggccaaggggactttcatcgaggctggagccgaaatgcgggatgagttcctggctcaaatccaggaggcagagcgtgtcaaagaagagtgccgtggctggagtgctcgggagatcaacgaactgaagggtgagctttccctatggagtttctttttttgtggctgcaatactgactgggaaaactagcctccgtccaacgaattcagcaacaaactggctggtcgatcgtttcggccgcaattccttcggatgatgcatcgaagggacctttattgaagatggcttatcgggataagctccaactagagttctatcccggggcttttgcctccaagaaaagtggccaggacgagggaaagaactacccgatggaactggcttcccagaagaatgccaacatttctcctattgcatccttggtcctccactcgttgcagcactacctggctactatccagcaatccactgtcgcacctaagcagcttttgcgcttcatctctagcgcatgggaccgcacagttgggctggaaaatgaggcgcgcatgctggaattctgtggtgttacccgcctcaccctgtccaagcctgatgtgggctctctttctctacgcacacgctgtacgctcctcggtaacgctaccgtatccacacctggccgtaaaggcattgcctcgaagaacaatggtgccaagagaatcgatgttgacttcactgtccgtacccgcatcgataaagccaatgcagagaacactatcggttccttggactttgatattgacgtcctggcgacgaaggtctatgggttcggaccaggcagcaagtctggtcttccagacaaggagttgcaaagcattctcggcaaaggccttagtcgggaaaaggacggtgatgttcagctcggaaacggcttgtggtgcaaagcagtgcgcatactcacgggatctgtgttttagttctcatttatgatttggttattggatgggttagctctggatttggaaaggaaggcgcagaatgagtctttttcatgcccttcttgggttcaatggcgcggggaaatgggatatcttgacttcgggatctggctgggcgttattttttatacctagtctttcttttcatatccactgattgatcatttgttttctattacactactagtagctacatcaacactcgtgaactcttgctaatgcatatacaaacaagagagtagagaggttgtgtttacaacgataacgataacaacaaatcaaaatatcacaccccgatcaatcgacccttagaacaaccccaagaacccattaggccagaccggatccgccccctgattcggatcctccaggccttgttgcggcatataaccataccccagactttgaggatcgaacccaccagcttgagccgtttggccgtcaatagcaggcgcgccatagataaacgactcagccgatagaatcggcatggaaggatatgcatcgacaggctgagtgcccgttgggatagagggcggaaaactgtagtcagtcgggtagagacctgcgaagatatttccgccgtgggtccagtcgccggccacagggtactggaagaaatcggggattgagttggcggtactgctgaaggagtctggggagtcggtgggattgggagtcatgcctgatgaccctgggggttgggttgcggttgtgggatagtcttgggatagttgccaggatgggattgacggtgcgaaggtgttctcatttgcttcgtgaaggaatgtggttgagggtgagtatatattaggtgggttggcgagatatggggattgtatttgagtgttgtcgcccgggtctggcattgggctcatgggaacgacgtagccggaggaattgaccggtggaaggccttctaaggtgtcgggaatactgctgtccatcgtggtggggctggcggtgcttgatgctggataccgcggagctgtggtgggggtcattgttttgcggagggttgttggtcggcggtgctgcctttggtggtgtggtgctggctgtgtccgagatgtatgcctcttgcctcctggtggtttataatcttggtcttcgtcgtctggggcgcgggctcttttctcgtctttgtcgatagctactctggcgatgcgttcgagggtcgcactcattcgggccatgaaaccggcgtaattatttgatccttcacctgggggggtgagagttgcgaagaaggccgagaccatgttgagggattgaaggtctgctcgcacacttgaatcgcgggtatcccgcagaatatttgagaataatgttgatgctgccaggaagacgtagtataataatgacctaagacttgagtgtgagaaatgaagctgataagaagactgttgtacttaccaggtccatgcgatatctccccatggcatgttattgacaaccttcagggtatctcgggcagcctgtgcaccaatggctgccgattttaaggcatgtgctttgctgattgacttgacctgctctgattcctttctggctgttatcatgtagttaagaaatataggtacccgatgaatcatgatcacagcattgtgatagacgaaatgcagaccaatagaggcaaagccaaacaggaagtcacgttcagtatgttttattttcggcccagtgagagttggggatttgcgtttccattcttcaagctctgcatatagttctttaatcgtcttgtagatttcagcgggggatttttctaatgccttaacggagtacaatcgactgtagatgtggctcttgatgagcgacatcagacagagctcgcggaagaatggaatgttgcttgcggtttcaccatgcttatcgccctccagttcttctggaagggggacatcgaaatcatcttgatgctgtgatggggcatttccaattcttaggcatgtactggaacattgggttagtacttgatacggcgtctgaatggacttctcttacctttggtcaatgacaaatgcaacccaaaaaacgcgccgtctctcctcttgctcagccggactaagttccggtcttggaatatctcgatgaagtcccattcggtgaccggagcgcatggctgcagtaatgagcggcagtgctgattgggttcccgcatttccccgaaggaagaacgcctttgcaaaattgttagatgcttccataggtgccaaagaaggaggagacgtaccatgctaagcaatgcctgtatactcagcagatcggtgcgtttcaaggctaattcagtgaagaccgacatcgcgtttttgaagtataactcggatttctccttgtctttttctgacttggagctactcgaggatcgatattcatatgccaggcagattaccatgttgatgttagcccagcgcgcagcatcatcacaggtttgctgtgtatattgccattcgaccattttcatgaatgacgattcaagatagataggaaatagacggttggccgtccggaagaaatctttgataagagagaatacctctgacctcgagggcaaaggtttaaaaaccttcgaggcaaacaaatcctgaaacacgtccggtcgccattgattccatggattttcatgacgggattcaggagatatcattcgcaaaaagctcacatcgcctgctttgctcttgatccattctatccctgttcgcgatagaattgacattgagcacgacgttcctatccgtgagttagtctggacggttttttttatcacatgggcggtactgtctatcttaccgaaatatcgagaatcatctctttggtccgtcggaaagatgggtgtaccttcgatgaacccaccctgtgagcgaagagacgctccgaaatttgattttggactggaagcagatgatatgctctgactaattggtccatcatcatcatcttcgtcggaaaagtcgtcatgactcatatcgctttcttgcaagatgcctgccgtcctcaacaacgactcaaccctgacaaggcggtctttcaaagacttgacatattcatcagtactgtgaaataattagccatgatcgacaaaaagccgatcgggacatggcaatggacatcgccgtacctttgctgattatcccgcttctcatgctgggcggggaagacacattgcgtattacggcgcatgcattgcacgcaagtcgaattcgacccttcaagctcacacttggtctttttgcgatgacacatctcacaagcctagatagacattatatcgccgttagcaacgctggattcccccttaaccggagtccgccgggatagtagaactcggaacgacaaacaagaccaaccctcaggtgctgtcctctccaaagcgcagaatccatgggcaatgcgttctgggaaggtgactgcttcattgccttggtggcggacggttgtggatgggagtcatgaacgtgcgtgccaagacttttcgaaaaagtcgcccgagcggaaatggcgaggactagcgggagatctttgttccttatttcgatctctcctgtttgatgtctactcataggcaaatgttcagaatctgaagggaaagagaaaataaaaggagatgaataatcaaggaccacggatttcgggactctcggattccgttcactttgtgttccggccaagtttgtgggatgttcattttacggagcacggagtacgtgtcatttgatgtcttttttttttagatatcttgcatctcggtgttataactgaaaggagcataaatgtagttcaaggttcccttaattgtgttcgaggtattcctaggatagttggcatgtgtcaaatagatctcatgcttatcctgtgagatcatcggtatctataagcgctatatgtaagccttcaaatattattatctagcttactagccgaaaagacactgccggagtagaagtacatcggtcacagttgggatcctcattgtaagagctttcaggaggttcgtcggagacttgttaacgatttgttcgtcaattgttctgtaggatatggtccactctatgtcgcagctgtcagaattaactggtcagtgccgaactaatggtaagtggtgagatctgactgggcctagagctgacacctgctgcagtcatcctagaccgagggctaggataggggtgaagtcggaattggtttgtcgtaatattgaggatctgaagggtggtgggagagcataaagaatggtgaagttggagagacaggggagatattcatatgttgatgagaagacgaactcgccgaactacctgtttgctagctagagataatcccctttggtagatatctttttatttgtattttttcctctcagcgttatagccaaaaaataattatttactagagaagtgccaataggagaaagtcgtacccaattctgacccttcacaccgtctttgggagtaacttaccacttgtcacatcaccacatctggcactatcaacctttttaatccttctgagaaacggacgcaaaatttcctggcatggctcctcgcaagacatagatatgttgtgtatttatacatatctcaccctgcatctcgagaaccgtgactgccgaggctaatactaccgcaagaaacagccgttatttcttgagcgcatcttgcacgacaacaattttctccatacatcctctgcattgaccctatgcgaccagaagacggagacatcaacggccagcacacaaaacccaacccaatgccggacttgtaaaccgccagctcgggtaagcttctgtccgctgatggcaagtctcgctatgtcggcagtgttcttgatgatgaagagggcgacctatgtgaagtatccgattccgaccaggatgatattggagctatgcaaatacctcaaacgggcattttgggtgtcctcgcagtacacacaatatctggggccgtactcggaagcacgcatagcatcaccgggtaacaccctggccatgaggaggcgtccaagctctggaatgcgtacgcacaaaacgtggagcctctgtgtaaggttcttcatcttccagctgtcgcgaaaatggtcgataccattttagagtaaccttccgtggcctccaagagcaacgaatgcctgatttgtcatggccgtgcagaggtgggatatttgtgcgcttgcagcaagaatcttcgatacaaccaacgctatctacggcagccctagcatgcaaaagtattgatggcaaatataagcttcattcctgtgggatgctatcgcatgtgtctattcaaatcacgaggaacttgtcgaaggcagaaaacccctatattcacaatcggtaagctaccaaggcctggcttgtgaatcccctaagtcagtcgtccccaaagccgactttcatcactgcgtgtacgaaccgaaagtaagcgagcagcgggagagcatggatgtaataggtggaaccactaagcttgcggatgatgcatcggatgcagttttcggcgacatggatgggacaggcctgtctttaaatggcggtctcgactcttcagattgggttttctgggatcagccgttttgagagaccagcctgggctcagtctacatcccctgtacgtacgttagtaaggtttgtccggagcgtccaatgatctcctaaaccatagatcaagtagctcccagcaatactcatgattcggctttcaactctaaaacaggaactactgagacagcgaccattcaatcaaacccaccaaacccctggaaacccaccaaacccctggaagcccataaagcccataaagcccataaagcccataaagcccataaagcccataaagcccataaagcccataaagcccataaagcccataaagcccataaagcccataaagcccataaagcccataaagcccataaagcccataaagcccataaagcccataaagcccataaagcccataaagcccataaagcccataaagcccataaagcccataaagcccataaagcccataaagcccataaagcccataaagcccataaagcccataaagcccgtaaagcccgtatacaaattagggtgaagatattggaacaaccacatcggtctatgtagaattcatacctcggcaagtcaggagtgatgacatagttcccatcgggaccggattacggaaggaccgacgcaccgtccaatcggacgaaatcactcttcgggccggcccgacacactctagtactgggtagtagtatccttcagtgcctggcccatctggcctttcactattgcctgaggttgaaaagataaactattcaaaaaagctctcagtctcgtttaactttgatatattcagagatacaactgctcgaataggagctgtgatagattcaaaataacagaaacgggggcgaaggagagagaaccaatgcaaatcccgatatctcgaaaagtaggaaaggagcaaagaagcaaagaagcaaagaagcaaacgaaactatcaacgatctccagcgtcatccaacattcagatcgtgacaggagaaaggcagcacgcgattttgaactgtcgaagtcgggtatgcaaaccctctcaagagtgagttcagcgacattttcccttagacgaagacgcctctccctgtgatgaggacgcctttctcgctcgaaccttttccatctcatccgtcaattgaaggcagtagctcataatcaccatagcaaaatgacgcatattgcttttgctttcaatgacccacggtccataatcttgcatggtgagaaaaggcagtgcagttcccctcgaaggacagagatctccttgtaggtatgcggggtattctggcgggtactgggcaagtgtcaaataaatatcgtcttcgtcctgtgagatcagcaggcgcctataagttctcgttagcatataaacattcaacggcatattattatctagcttaccggtcaagaagacacttccggaagttcgcatcagtcacgatccatgtcaccatctgtgctgcttcctgccataggacctcaggacgtgcgctccagcctcgtcgcgccgctatcacttcgatgatggcgaaggtttcgcggatatgggaaccttcaagataaacattggtgcaggcagtcatctcttgaccaccgagacacacagtgttagggaggaagtctatcgacagtccacaccggaacgttgattgtaagagtcctgaggaggttcatcagtgactcatgagctacctgctcgtcaatcgttctggagagtatggacattctgcatcctctacagctgtcagaattgagggcatggtgagagacagaagagagctgtattatgtgacgtgccaagtcttgcaaggatagaagagtgtatcaattcaaaataactaagatagagagagagaaagaagaagcaagttgcaaagtgggaagcggcggcctgcttatatggttgaccttagcaatcataacatattagtatagaggagacaaacacctagaactatttgtttgctagttagctatcatagggtgtggctaaacctgctaggcaacccacacgtatctttcaacgcaccctgttgactgacttggagattcacaagccaggccctgggagtttcactggactaggttattagtattatatttatttaagttcattgatgccgccgatttcgcaagtgatcgaacacatccgtacggtctctccagcccaactagttggcttatattgtagcgaaggaagagctccaccggtgctgtatcatcgtcctcgaagctccacagttgagaatactgtagaatcaaactttctccatcaaatgaagcttgaatgatccttccgtgctgttcgcccatataggagagaaccaataactatagataggtagagacaggggattaggaagactttggctataatccatggatgcgatgtgggttgcttactgggtggataggatatttccggaagggcctgtgggatgtccgaatgagcaccatgttcactatagctcttacttcatggagagtgagacactggtcggcatgatttgctggaacgtgtgcaatattttccataatcgcatgtggcatagggaagttttcgtcaccgccttcgaggagatccattatgcaccagtatgccccaaagtggtccccggaaagcggggggtcgttcatctttcttttcgccctgcttgatattcagcatatagactcaaattcctgaaaataatcactgtttactatctctcgcagtgtaagagaaccaaggccaataagagaagtgcatggcggccgtcccttccggcgagcccaatgctggcagtacatatagaactgtaattcccgggcatgggtaagtcacttctgcggccccgccagtgacatgagttcgtcataataatcccttgccaatctgagagggtcttgtacatttggacattctgtgaggacatctctcagaattgaatcaaagtctgggcggttattcagctttggaaggcagcctccttcctttggatatatttggaggactcgctccgggtaaggccgaaaaaaacatgggtgaaattgcagattaccggcatctgttatccccacttgagatgcttagattccgataccttgaagatctctaggggagagaaagatgaattcacagtcgttgactcgtctatagaggatttgtatgatatcgtgccgcctggttagggtttgtgcattcatccctacggggaaatggtgagatcatgagagtggaaagacagaggatgagaaatcatcaacgtgagatggagtgatgtatacacaaggcggtcaatgctggggtgtattctgccacgacactttggagtcactctctaccaacagcgaccatagggaggcagaaggataaaacccacaacgagacctcaagaatatggggcgatgatatgaagtggtatgacggatagaaggtagtatagaggctattcataagaaggccacctaggcaatattcttaccaaaatagttgctgaaactacatatcctcatccagtgaatatattttgctctcgggccttcattgacacatagtaatccttctgtaacagtggggagcaagaaattggagccggaaatagtacacatgtagtaatgatcaccgaattccatgactaaaatcgacaggatgcttcaccatgcacctaactagtatgttgtacgtgacccctaaaaccttgtgccttatgattttgtgggttgacaggtggatgtacctgatatgtctcaagtatacaggacctggtcatcttgggatatgaatgtcagttgatgtaaacatgatgccacagttatcccgatccatttcccgatttttactccgtatgtgaattaggaatgaccccttttcagaaggacttccctacacagactgagaggtgaacataagcttaaatcctccagtcactcgccatgtgtatatgtactgggaatcggggcaatcacattatacagacttacaaccaaccaggttggaaggctgacaaatgaagcaaatgcacccccgcagtagaagtcaataagaactcggtgttttgctagtttgcctaaaaaaagtctactgtcatctaagacctgaaacaatttcttcaccatgagacccgttacagttggaattgtgtcgatcggagacatgggcctcggcatggccaggctcctaaaagcccacgattaccgagttgtcacggtcgcagaaggaagaaggtacgaacaccggaggcgaaaaccaaagccgagaaactaacggccgctgttcggccagtgaacacacactggcacggatccattcagccggcatcgagatcctcccctcggaccaagcgctagtaatccaagccgactacgtattgtcaatcgtacctccgcggaatgcagtggcgacggcgggacgaatcgcagctgcgtgcgcactgccgtcgacgggcagtctccgggaggcggtggaggacgtagagaacccgccgaaacggtccaagctatactacctcgagctcaacgcagtccccgcccgactggcgtcggagatggcggcgcaattcgacgagccaaccacaacggacgggggccgagggtgccacttcctcgatggcggaatcattggtgcgccgccgtcccaaagcacgcaagacgggagctggaagaaacctagcgtggtgctgtctggattggtggatctggcccctgggtttgcgacactagccggggtgttgaatataaggcttgtctcatctcggattggcgccgcatccacgctcaaactatccttcgcggcgctgaccaaaggtctgaccgcgttgtctatcctgtccttctccactgcgcagagggagtcgatgttgccggagttgctggcgctgctggaggaatactccccacgcactgcggcgctcgccacgaatggggtgattggcatgagtcccaaggcataccggtgggaggatgaaatgcgtgggatcggggagatgtttgatgcggaaggcggatggaatggagtcggagccgatgtttatggaggttttgctgagatctatcggaccattgcggaatataccgtattaggcgaggaaagagtggagcaccgagtgcgaggtataacgattgaggacgccgcccagatcatagctcagaggaaaggtgcttgagttgtgggagtcggcaacatatgtcatagggacgatcgaatgtttctagacgacgcgggaggggatttcgggcccggttgccaaggtgttgattaccagtccgcgtcatctgtgatgcgctgaattgaaaagtggacgaatgatgttgaatatagaatacacttacgcactctgatacgattacatactcccacactgcatgtacctggagactccatatattctactccgtacttcgcctcaggtactggttccgaggcaagtggagatatcagtcttgtttttctccagaagagcttgatatttcgaatccggagaagctggatatatatatagatttatatctgatatcgtataactatcccttctataccccgtaactaaccactgatcgatctatactccgtacatccaaagcggtgaatgtccccacgaaccacaactcgcgatcacgacatttctccattctatcagatcatcgactagcatcgtttttcctggtctttctctttgccccccccctttttttaaaccaacggccttttattcctcttctcattcgctcaggtggaactcccgcggcatgcgacgatgaagtgacctttctttttcgagatcgtgtggccgagagctcaaccttcccggtcttttttcctctggtctctgctttctttttcttttttggggccttttcgtcgatatttaattggcaattcctttttagggtgattctgatttgcttcaaaaaatatcccggatctggggtgtctctaaacatcagaaagcccctcttcttcttctcccataaccctaaaggtccaagggggctgaacttcctttttatttcttttccctcttcaaccatgccgggggaacaaccacctctaccaggcccgggtcccgtcttcgacaaacttgagaacttcaattttttgatgtcgcgtcacgatccagcagccaagacccgacagtactcatttgacgctgatactgggctggtcccgtttggcaacgcgaatatggattatgaccagaccgaaggcatgggcggtctatctgtcagttcttatgagagtatagaagacgatcgcagctctctcgatctccgaggctatccctatcatggtacgtgtcaagcttttgagacttttgttgcccaacgttgcatttgttacgccatcgcgcctctgcgtctgagctttagtttggggcttgaaattccaagtctgaaaattgaagttggatgtcttttttctttgatgattttgtccctgttggtttttttttaaagaaagaaaaaaaagtcctggataaccaggttgaaacctcttcttcccctacacaatcatgttcaccaatttcatttcgagggcttaaaaaagaaaaaaaagaaaaaaggctgcagagcccaggatgtgagctgtgacatgcatcttccatctccaatggtggaaggagatcaccgtcggtggtccttaaatgcacgagcacgcaatcccgcaatgaaatgacaacggccagttgccagcttacgctgaactgcacatccccttgagacccttcttgagcttatatccttccggaatatgatttacacttcccgatccatggggctcactccctcggggttatatcgacttcgatcgcttactccatccataggccctgccggcgagaagtccatcaactatactcttccagagcacatgatgccctactcagcccattccatttacccaccagtcccatacgcgcccgacgagctcggccacgcacagggggccctcacgccgtccgatgtgtcctcgtccatctccccgcccaacggccagatgggaaacaccaagtacagcaccaccatctccggcgatcgcatcgccgccgccctcgatcaagaggagggcgtgcgcggtgccgcagaggaagatcgccgtcgtcgaaataccgccgccagcgctcgcttccgtcagaagaagaagcagcgcgagcagatcctcgaacgcaccgtgcgtgaaaccaccgagaagaacgcttccctcgaggctcgcgtcgcacagctcgagatggagaaccgttggttgaagaacctcctcacggagaagcacgacgccggttcttctcgtctgcctgctccggctaaggatagctcgaccctcgagctaaaaggtcctggcgccaataccagacaaaaacatattcagcccaaaaagaagggcgtcggcaccgaggagtgatgatccaaaatggaagaatgtgcttttttgttgtttgtttgcgttgttgttcgccgttctttgtatcatctcctcagcctactccgtacggtctcctctacaaggcgtccgtaccaaatcagcattctgtcttgttttgtttttttttttcgtctacttgctttgctatggtgtctacactcatctaccccttcattctggcagggtagatgagcgcagacaaaatgacgacgtcacgacccttctcttcttctcgtttgcccggatctcccgaccgtggcttcttcgacttctagggatggtctttgtttttgcacttcagatctggcaactttcgtttgatatttgaatccgctatcctctctctacgctcgccttcctgccatcgggctttatctttacaactcctgcccaggctctataccttctatacatcctctcaacccttcctatcctctttccatcagatcgtgtgctgcgaaggcatgtttcatttttctctctttccccggggtttacgggaaaggagatgagttggcggtgttgtggtccagactcggggaagtcaattctagtttttgctttatatggtactggtttttttatatttgatatcttttctcttttgattgctctgggacttgctttttttcctgtttctttggtttcctccgtccttgctagctatctgtggactggaatacaatctaaatccccccggggtttatcttttgctatacgaattatctctactccggagtccgtactccgtaacaactgttcttctatcggattctgcacatacgtaatcgcaaagacgcaaaagcaatggcgggtgacgtgctccagctggcgtgctatatcagagcgattgcctcacggagatccaatgccattggagaatcggatgtgctgtgtcagttttccggggtaagggtctccccacagcctacagggctgcactattcaggcgaactgcacgaacagccacacagacagcacttttttaaattagcctagccgtacggagtatacggaggtatactggatggagtaatataaattcctgcaaacaatccattagaacacccttgattaccctggactatcctaatcctcaaaaacacaaaaaaaagaaccaaaacaagccaacataagatggtattacatcgattaagtagaaacagggaattgaaataaggaaaaaggaacaaaacaaagaaaaaaaaagactagacaattcccaatcgcacttggatctcagagtgacatctccaaactccgtggagaagggaaaggggaaattagacccacgtccgatcaaaagcttggagaggtggacttccccccgaagcacgattcatagccgttagatcacgacatttcatgtgaaaaaaaaagagaaaaggcgtcaaaacgtcccaaagctgcatgacgtgattgatgtgcgtctgcttcgagaatagcacggaatcaataaaacaaaaacatatatgaaagatcaaaagcacaagggatgggggatgggaattgatttttgacaaaaggaacgtggagatgaggaccgaccggacagacgaataaatcatcgtgtccatgcatctgccctagaaatttcagccgtcagattcgtgatggaaacaaggtaacagtctttctctcgcccatctcttatgcggcaatagactcgcggtcctcttcgcggccgcgctcctcgccctcaatggtgctcacaccatcatcggcgtcttcgtagctggggtgctggtcggctggaagccaagagtcgcgatccccggccaagggctggtcctgtgcagacaaatcgacgccctcgcggttcttgctgaggttggagcggtggcgctgggagagggtgcgggagcgctgcgagagactagacttgaccacggccttggaggagacccagttggtgagggcatcctcgcagtcctggatgatggccttggaggcatcgtagccgtcgtaggcgttgcgggtctcgccaggagtgacgggggtgtcgtcgatcaggtcgaggaggtgcttgccgtaaccagcgacgatggccaccttctcgcagtgctcgcggagcgcatcaaactggtactggaacgcggccttgaccttctcgcgggtgatgttggacagctgggcctcggcgactagggactcggcttcggcgcggacgagctcctgctccaggacgacgatgcggggcgagttggggtccttgtacttcagcttggcgatctcatcggtgatcttctgcttgcctggagatcgaatttagttaaagctgaggagttgttcaacactgctgggagagtcttacggtctcggctgggctgtacggaagcttcgatgttgcggatgctcttaatggtgacacggtactggtcgtagcggtcaacgaacatatcctctagctcaccgatctcgtagatcagcacgccgagcttgtccgtcacatccgacacatcctcatcgcatgcttcaccccaaatggagagttgttgctatggcgaccgagtcagtttccaattcgttataacgcggatcgcgaactcagggtcatcaacatacagcgacttccatgcgctcccgggcgacgagctccatgctgcgcatggcgttcttctccatcttgacgagctgcgacagcttcttggcgagctcgggtccgaaggcaccggcggcattcttacggaaagcatgacctgattgtagatgttagtttagttcagttttcgcagcgatatctcctctctctcttgcgactggtggtctccaattcggctgtcgtttctcggaggcgggggaaagtcgatagcggcccgatcttgggcagccctccaacgcgacgaacaccctcggagatttccatcgaagccaatcgcaacaatgtctcaatcgcactcaccgattccgcctttccctagccatctcccggtcttggttgtggacactggtggtagtgggctctcaatctgcgaggcggtcgggatgcgcgactggcgcatggaataggtgcgatgcatcatatggctcggagaggaaagtgaagtatgggaagatggttgtagagaggtagagatgtaagattcttgttcctgtagaaaaagaaataagaaaaaagaaagactttcccgttgcgcagtagtgacgtgagcttaaagaggggaattctttttttttcttgtacgtacttgagctggatgtgacgagaaatataaactgcaaacggacaggggaggtatagtccttttcaatgaaaactggagaaaggtgaagttctcctggaagctctcgggatgtgacgtcgactatttctgcccaaggggaatggactgatcggggacgctttgggggctcgggattggccagacgagcgcgaaaactcgacgacgctaggacaataaagagcattcactgcataaaatcagcctctgccaactccttccagctattaatcggccgatcgcatcgcgttgcaaatttttccatttttttcaagtcttcacgatcacccgacgtcattgacttccaccctgatgtcatggagttatgaaaaggttgcattatatacgctgatactgctatatgctacaatccgacagtagctacaagtgcctggattcccttttcacggctttgagatcgaggaactgaaactgcatactgtatagagctataccattggtgccccagttccactcgctgatcgcggagatcgtggaacgcctgttcgtggggaaaacccatgtggtctcggattttaattccacccggggcacggttgtaccttgcaagagtaactgatgataatgacagaggtttgattcatagagctatggaagttgagaactcatgagacatcggttagaaatggcttttggcttgaagggacgcagtcactaatcggccaaggcgttcattcaagcagctttgcccggtcatctcctgatggtgaaggtttctcggttcttgacttttctgaggaaaattgtttcatcgtagtgtccctgcgagagatagaatctgagtactacgggatgaaacgtaggtggtctggaaagtctcttgagttgcgtaagaaggaaaaggaaactatccaagtgctgggagagcggagaggtcatgtgatctcgagcagcccgtaactataaatattagtacattggtaagtcgtgaggatagtgtgtatcataccaagtggtcgacaaaatgagccctcatttccagcttcaaaaagctgcactcgagctagtgacagcacatcccatatcaagaaacgaacgatagtacggaaatttccgattatacgttcatgttgtcgacttatcaagtaaagggagaccgtaccgaattgtcttataggtacaatccatggatatgacccatgggttcatctcgagcatttgaacgcttgacttatgcgtgcagaataacgcagacacacgctgaagcgctgccggagccatggcgtatttgcttctcgatgaatgcaagatcagcactatgataaacgaccacgcgatatcactgatcggccaagggattcggcctttggacaccggtctcatctccaactaattggagaccgagtttccttcttttttctgcgtcataacctgggaccacttccttagagatttggtgagtgatcgcggatatcaaaaacccgaagagaagcatatctgcactctcgaagatgttaagatccgtggccaacaagcaaatactcgaaacagttcagattatataaccagcggcatttgtattagctctgtggcgagagagtgtaggttaggagaggtatttgaggcgcatggttgtgggactaagacgaagactatcagtgagtgtgttttcaagctagtcgtatctgatcgtcatattctcaccttgaatgtcattaaatagatggagaagatatggtatagagaggtagaggttgtgtggagacgtggtagaagagaaagaagagtgaggggcaaggaagagcattttatattggttaggtgaacacgcttctcatgtattggatcacttccagctctatcgcaaaccgagaagtcaagctacccttcgtttgcttaaatataatatatatgcatcctgattcatcggtatcgagaaagacataagctggataacaagacttagatgctaacgaaacaagaagggatcaacagaagatagttgctatgatgatataattattatgaagctccctaaatagcttcatggagagacaaaggcctaaaagccacaaagggtcacagtttgtcaacctgcgggcaggaagacaggaaaagccccaatgcatcagtaggcatttctaaccttcgtgaactacccgtcgaagaggctattaccgttgggcgttggtcctcccaagacgaccagaccatatagaatgcagtgatattctgctatagtaactcttattatgaaaaaaatgagattgacaatcttatggaacaagctaaaaaaaaggtatagacactttagtcatcatatttcacaagtttcttggattcaggcgccactcgaatgagctttttgttgatgaattctccaattcccaattcagacaactccctgccaaagccggagttcttgacacctccaaatggtaactcgggaactgtcacaaagaatgaattgatgaaaaccatgcccgcctcaatcttatttgccacggcgcgagcatgttcgtgattctcgctaataacagacgaaccaaggccgaacttagttgcgttggccagttcgatggcagcatcatctgtatctaccgagaacaccatggagactggaccgaataattcctcataaaaaatggggttctccggagtgacgtctgtgatcatcgtagactcgatatagaagcccggccggtcaatacgattacccccaaagagtaccgtggctccatggcttttggctttatctatctgatccaaaagcaccttcatagcactttccgaggacagcggagagacagcagtgtgaggatccatagggtcaccggccacccgagagctgaaccgatgtctcatgccttcgataaagcgctctgtacgctccttgccaaccacgataaagcgcttgggcgcggagcagacttggccaagacaccagatacgtccagcgcaggcctccgcgattgcgaaatctaaatccgcatcctcgagcacgataaacgggtccgacccgcctaactcaaggatgacctttttcaggtttcgtccagcacattcggcgacgatcgaacccgcgcgctcgctgccggtaagtgttacaccacgcacgcggaagtcgtcgatgatcgtttcaatctgtgatctggtgcaaaagagattcgtccacgcgccctcaggcgcaccggcatcctcgaagagctgagaaaatgcgagcgcgcattgcggcacgcgtgccgcatgtttcagcaacaccacgtttccagccatcaattggggccccgcaacacgtgccaattgataatatgggaagttccatggctcgatggcgagaatgatgccgaacggttcgcaaatgacttcagaactagctccgtgctcgtgaatcgtggtacctttcaagaactcctcggcgttcgttgcataatatgtcaagatatcgaccgagagtgagacctcggctaaggcttgggtgtataatttacccatctccttggtgatgagtgtggccatgtgctctgatcggtcactcatgagccgcgcaacacggtgaagaacctccgacctttcagcgatagtacgccgtcgccaatcgtcggtgaagcattcttgtgctctatccagtgcattggacacctcctggtcggtagtatccttatacgattggaacagttcaccggttgccgggttgatggatttgtaatgggctggcttggacattgtcgaatactgatgaaacgttcaatgttgaggacagtataagatgataaaatgagtttctcgacagttcttcctccggatatttataccgcaacacagctgtcactcgatatagttatgaccggattagggccatcccgcgagtggatagagtttcatcattaaaacgtcagccattcatataacgtcattgactacgataacagagcttagctcatgagaagtaaacatcgcccggacagaattcggcgttctatcggattgttttacagtttgcactaatgtgtggttttaagctagtcgtattagatcatcatgatttcaagacatggcataaagatctagaagttgtgtagagacgtggtagaagagttaggagcaaacaaagcattttatactggtcaggcgaactcatggtctttaccagagccagccaggagggataccaaatgccatgataatagtgatggaagaaagctggtcttttaacactttgcagcagggacgtaatctatattaatagttccggtggtagtattgcttactcacattgtctccaaattacatatgtatgtcttcatacacgatttctgtacgtagattgaaggtaaatggtggagacgaatacctgtaattgggcaaatcgaaagatgctgccataaggatggcgccgatgatacagccgaagttggttatgaaagccaccttacgtcggctctagagatcaccaaggtagatagatatatgaatgcggaacaaagtgaagcaattaaatcataagcctcgtgtgtgtttaacgtgagggtcttttcttatggacccaaaatccagaggttctaatgcggtaaaaatggacggtgagatgtggcagaatgacccagccggcagaacacatatgcactaggcccaatctagctagatgatcgtgatccacgtgactgactttctatctcacacccaaacaaagcaaataggcaagccaataagccaataagagagcggctttgtgtagccttagaacttagaaccagtcgcttcgctctgcaacgactatctggaggccttagaccaccgagatcactagtatgattggcttaggggcagggctatccgtaagtgcgttgtggcgtggttttgcttttgccaggtcgatccaactactatcgagcttccctctccaggacgtagctacattacaacatttaaggttaaagcaatatattccttccaataaccgagaatgacgaggtggcaagtctaaatatcaaccaacttccggtagcggacatatgttgccgtgcgggaatctccgagtcctgagctcaatccgaggtggcgtgacgggtctttcgcttcttattcgtgccggccttgcctttagtagttgagccacctcttttgcctttactttgcgaaataggggcttctttctctccgtccttgttagctggctcgccatcccgcgaggtttcgcccgtctgagcttcctgacgtagtcgactaaatgccttttccatgcggctgggtccacctgtacgaacgcgaggcgcaaatgcacccgcgccctgaggaccttgcatgaaatgcgtgatattagactgtgttccttcctgttctcgccggttcatgtcgcgaataaccggcaccaggacttcatccgtacgctcttggctccagccaattgtcgtcatgaggaaggttcgtaacgcattcaaatcaggaacaccccattggaactgggaagggtcgtcgtcaaccgcgggttccaggtatgcctcgtcaactttagcatcagggaatgaaggaggtaagaatatcttggatgccttctttcgaaatttcttccggaaggcaaggtgggcgtcttctgcattattcgtacccatttgcaattcggtccaccattcgcggaactcttcgagactggaaaactcggtgagtatctctagggctgtgacaggaccaatcccgggaatgccctctgtgtagtcactgcccaagagatgggcgaagctaataagcttccgtcgatggagggcgtactctttctccaagtcagacgtcaagtagcactcaacgaatttactttgattgaacatgtttttgtagactcgcgttcccccgaaaaggaagatatcactgtcatccgtgacaatcccgtccacaaggcctagcgagactaatttggcgcactgcgcttcagcttccataggcgcggtaatatagggcaatccgaagagcgtcaagagctgttgacactcattgatcataatagtagtcacctcgtctgcatcgcgacgctcattcctctgctgagaccgtagttgcttcaattcttgctcgtagtcaaaggcctcctggctaggagcagcagaattaagagtattggcaaatcgaacgtgctcctcaccctcagccgcaagctgcttgaacagctcttcatcttccgggtcactatagtcggcttggtcctgcacaaagtcttcaacctcttcgaagaactgaggctggggctgggccttttgatgggatacaacagtgatctcggggccttgggtgggcagctgagggacaacatcttcgaattctggtgagggagatttttcgctgcgtgaggacagctcttcaaccgcgggaacttgatcctggatttgtgtttcagggcgtccaagtgccgtttcatcgagatttctattgacctgcgctggagctggttcgctcaatggcttctcatggagatttgtaggaagctcattgtaaatcttttcaatgtcctccatctggaagatctgtttggaattctccttctcctcttccgcctcctcctcctccctcttctctagatcaacgacttctgtagtagcggaaatttcgtcaacatcgattatgtccggcgagcgacgattggagaggaacatatgatctggcaccgcagatcgctcatcatccttttcaggatcttcaatgggatcaacgatgaatcccacatctgagcgttcgccaacaaaccaaggaggaagtgggtcaggttgttttggtttctctgtaggtccctttaggaagccccccgcattttcaccaacctcgccagctttatcattatctttcgtgactttagtgagtttgatagattcaaaagggagaggaccaccgaatcgagttggcgcatgtgaggcttttttcgagacctttgttcttgctatggctgcagcaaagtccattccatcatcgctctcggaatcaagatctggcaccgtctcatagggtggagctgattctaccggtcgattgatgggcatatcaggcatatcttcgtcgtcgactttatctggttgtaatgaaagggcaatagcccgttcaaggtcatcgtcatcgccatcgccattaaagaattcatcagtgtcgttgttctgctgctgtgcggcaatatttccctcagcttcaacaaaaagcgagtcatcttcaacctcttgtacacggcggtcgttcaccgactgttgctgtgcagcatgacgcgattcttgtatagcccttctcatgtctaaaacctcattcgtttgaagttggagcgaccggtccaatacaccctcttggaggaaaggaagtttgggaagtcgattcagaccttcgattggaacatcctcgaactcatcttcgtccgatacctcatcctcatcggacagtatctcaggtcgatctagatcgatgggcttctcttcgtgaccttccctgtttcccacaacacctagtacccagccaccttcatgttcgctatccttgacaagcacatattccctgccacgttctcccgcaacgcgcttcccagagttatagaatgcttcgtctccgttcatgccgtttatattcattaatcgttgcgtaaggtcattacgttctgcgacacgctcgatttgaaacctcgagaatgccatgcggtcgggaaacatggtatctagctgctcttttgaataacccattcgaagtcggcttcttagcctcgctgcattcaagatgttgtagcgatcagtggcgggcagactaaggaaaaacaagctgtcgaagtcgattttggaaaaatcgtaaaggttgatatcttgaccctggtggaaatgtctagcatactcctccagttcttcctgggacataatgcgtggatcatttggcgctcccatatcttgaagagagacgtctaggttaggtaggtggtacgcatccttcttcttgaacctgcgattttgttgcttttccgtttctgtcataaaagcctcctctgcgtagaccggagcatctggcacttcttcttcctcttggatatgggtcttattgcgtcgacgagcgttctcctcctccgcactgcgttgcatttgtacggcaagcaactttcccgcggtcctcgcagcatcttccctgtgaccctcgcgtttcttctttcggccagcgattgtctgccttttcatgaccggggccccgccatcgaagacgaagacaggccggatcccgaaatacagcaacttacatatgcgacgaaagaatccgacgatgtgagaatttcgtagcgcattgccttctttgtctcgtaccgccttcagaaattgatagatccagatcgacgcgtcgacagctagtcgttttttgttcagtgtttcgagtttgatagggcgagcgcagggctgcacgaccgtccagaggccggtgacacccatggctagtcaaaggggtattgaatcatgggtgtgtattggggaggtctggcacttaagacaaaatccacatgtagtgagagagctgctcccaggtggttgattagcgatagaggctctgccgagaagtcgtcattccgctcccgcgctcgatcgcgagatcacgtgcgtaatcttgcctcttatggattagcgtttgaattatataagcatgccggggaaaccatcgaaaaagtagttggtgggctttttttggcgtttggtgggatacacttttatctgaggcaattgagacaatccgggtaatcgcttctctgattaatgtgcgtagaagttggcgatgtctttttcgctcgaggtcagtgttgttatactgtagtcaaatgctgtcccgctgactcaagatgcagcatattgatgcttttctcccgataacagcgttgaagacgtttgtattgggtgatagacgatttatctttcaaagtcaaggcacattcttccgggtggttgatgaaatcaccggtattgtcgctgctcaaatccaaatattcaaaagaaacaatattcatggtttcattcctttgaatcaacgaccacaggatcaagattcgaaccatgtccaaataatcgtctggggtggtcgctcagtgcgagcggttgacctcgttttgacctctgatcatgaagtcacgttgtcggcctctagtgccgagttcattgctccagattggatcatgagtgggtgcgcagctgttaccggtggccatcacggggctttttttatcaccgcgaataatgccctcctgagtctcgaagtgctcgacagcgggatgcctgggcgaaatataatatccatatatcaactggcgacaagtgtaaagtccatcctttactccgccgatgtgattgcactgtcttcctctcatgtcctcattgccgctggtaccgtcttcggagaaatcattgtgtggtcgtgtttcttgaataaaaatggattacacaaagctaatgcagttggctctatccaccatttcttcacgggtcatgacggatcaatattcggtgtccgcatctctcctcagatcccgtccttgaatggaggcaagtctggcaggatactcgccagctgcagtgatgatagaactgtgaggatctgggatatatcagattgtgaccacaagacagcccaagatccttccgcatactccacagacgggtttgaattgcgaagcacaggttttggtcctgttgaggcaggcgaggagagcgttggatctgaatcatgtgtggtccaggcctttgctcatgcggctcgtatttggagtgtttatttcagggccatcaaacataataaccaaactcatatgggattggtttctcgtggagaggattgcacatgcgttctgtgggacctaagctggcactcatcatccgctgagacgaatgactatcagctcagccagactacttcaatacaaacacatattggaaagcacatttggtctctagatctttgcagaattggctctgagactgtggtttataccggaggcgccgatggtgcactgaaaagcttccccatcaaagaaaacgacgacgaacatctgggcaatggctctggtgtttcttcccagcaattacctagcttgcaagtaaaggcgaagaacaagcatcccacagccgatggaacgaaagccttcgcatttgtcgcccaagactgccttcttcgcacctctacacaaggtcagatccaacttggatatcttacccaggcggaggagactgccattacttgggagacactatgcgaagcacctgaccttgcttcttttggcgtcatggctgctttaccccagataggtctagcattgatcggtaatttccgaggattcattcggctctataatcacgctacgaaatctgtcatcagcatcacggacgttggtaacagaccccttggaatattcttccttcagactcactcttccaaaatggatatgttgaatttctctcaaaacattgcattccttgtcttttaccctaccggagaagaaataacagttgtcaacgtctcagactggaacagcgatcatccaaatgccgaaataaccacctatagcctaccatcctcatttgtggtttgcagtgcggcttttatcttcgatggccaatatttgattataggatcaaaattcggcgcccttgcaatatacaacacctccgaggccgagcccgtattggtcaaccgtcgtgttcatggccgagagtttgtgaatcacatcagcgtcgtgacatccgttactacgagtgatatcacaaaatcagacttcgtcttgacctgtgggcgagatggaacttattgtctccatgaattgcagctttccgggaatggaaaaaatgttgtaacgatagagacagtgcaccgtacagcatctatcaccggtgggaatattgaaggtgcctacttcgataaaacaaccggcgatttcatgttgtacggattcagatctcaagatttcgtcctgcgcaacgagtcaaagctgacggatatcgtatccattgcttcgggcggctttcgccgaggctgggactttatgccaggagacaaagataacaatgcgctgttcacgtggaaggacggaacttctttgatgactactcgtgtacgagctggtgctagtactttgcttcgagccggaggtcacggacgggaaatcaaagcgatggatgtcttcaaccccaccgatggagatcggtctctttttgcgactggcgcagaggacactactgttcgtatttttacgccgacttcctcattggctgctagtccatggggtagctttgagtgtctgcgcgtcttggatacacacaagtctggcatccagcaggtgacctggtccaaggatggaagatacctattcactagtgctgcatacgaggagtttttcgtgtggagagttcgcaccattcctatattcggcgtttctacgaaattggtggctgcgagtccgaaggacgacccgaactcagatctccggatacctagtttcgatttgctggaagtagaggatgttgacggggagcaaggtttcctcctgtgccttgctctttccaactccattttcaaggtaagggtagttctttttttcaaatattacggccatactaacgtcattgcagatcttccacttttcaccatctaatgggggcaaatttactctcttggctcgtgggaaatacatgaccaactgtttgacacaagcccacttcttggtcacgagctcctccgtgagccttatcaccgctgcgactgatggctacttcacactatgggatctaacaagcacacttgaaccattttacactatcacacaatccattttgaaggccaagcaccccttcgaaggctcctccatctcaccggaaaatatcaaatgcgaaagtcggtatcagatccattccaacagtatcaaggggatggagctggttcctatctctgacacggccactgtcattgtggctggaggtgatgataactctctctccgtgtctctcctacgaacaaatccatccgacaccggcacaaatgcacaggtagctacggtttctatcccagatgcccacgctgcagcagttaccacagtcaaagttctcaaccagcaaatctctcgtgatattacatcaaatacagacaccattcaaatcactgtggcatcttctggcaacgatcaccgaatcaagatatggtcaatcgccgtggaccctacacagcctgacacgaaagggattatcgtgagattcttactggatacatatagctctgtggctgatatatcatcaatggggcttgtccgtgggcctatgaatggcctcttcacagagaaccatgcgtttagtcagttgcgattggttatctgcggtgtgggcatggagatgttcgctgccgaatcggatcgagtcctatctgcatgatgccgatttgatgttgaatatagataagatttcaatgtgacaatatgaacatagacgataccatgtgagattacagactcattgagagggatggcgatagcaaatcaaccgggcaagaggaaaactctagcgaactactcgggtaaccaataagcagattagggcatgcattctagctacaggacaaacctatattcaatattcagcggagccatacgattggacaacatagtgtcttcgtgaattcgtcaaaccacccagctcctcttaaaaaatgaaagcttgactattccaatactaatccatatataccgtgcagtttcggagagttcgccgtattttgcaccaatatggatgaggcggaacgaaccccttttgaggaaatgattcccaaaaggatttaatcaaagggtattgttataggcactccaattaaatggtttcaattatttgtctccgctctagactaagacgaaaacagcatttcctaagacgggatgactatataaggaaagaactatggacgtgtgaatattttctttacaacagactacaataggcatctattccacatcatgaagcatttcattactatgatcgccgtcgctgggctggctgctgctgctcccttgcaatctcgcgatacgaacagttatttcttcacattgtaagtgataaactgcgtcctttattcatcgccggttgggaaaggagctaagagcacccgcagtggggattcctacaccatgaccagtttcgatatcgatggcacgcagccaactgctagcaatccaatggggaatccagcactgggtaggttttgttcgcccatctggcaagcaggcttgactgattaaagacaataggtaccggaacaaccaccggcggtgtcaactgggtgggatacctgactaccgtgaacaatgcctcactagtccttagttataacctcgctgttgggggagcatctctcgataattcccttgtgaataccaacgtcgaagatatggtaacgcaagtcgccagcttcgagacaacatatagtcagaagcctgatattgcaccgtggacttcagacaacgcaatttttggattctggattggaattaatgagtacggtcccctggattcccgctaacagctaactaactccaatttacagcattggttgggcttggtcaagcaacgatgccagtgttctgattccaaagatcatggcccagtataagactcaagctgaaaatatctacgcaaatggaggacggaagttcatcttcctcaatgtcccgcctacaagccgatctccccaaatcgccgatcaagggacaaccgttgcagccggccacgctaagtggctcgcggctttcaacactgcccttcaaacaatggtcaatgaattcattgaagataacagtggcgtatgttcaagctgattatatacttttgcacaattaacctggctgcagactacaaccgttttctacaatacattcaccttcatgagcaaggtcctcgacgcccctacaacatatggattcaccaatgctagttgtgtcagtgacgatggtgctacctgtgtctggtggaattcctaccacccaggttatgcttaccacaagctgcaggcagcggatatgaaagagcacatgcactctttcggtgcttggtagactcttttggatgatctaggaaggattgtatgtcggactaagactggtaaggttcaaagctcaataaatatgtattcctgtctctttgcgagtgaatatcgatatttttgaccgcgatggttcctgttcagcttgcaatcaacttgccacgcttacttgactcacacatttggttttcttatgttcaaaacgaatgtattcttagttaataaatatggattattcacgcatattacactccactaccccctgcatgtcaggaatcatagttaaatgccgatcgatactggaagcaccacgggcttgaaagccacctgtgtctgaagaactatttcttggggattggagcggggtatgtacgatggatgtacagtgataattcttcttggttgaacatggatcaggcttcttctagtctaaagactcggggacattgccttcttggctatccgtttcgcatgaggtcgccaagaaggacttttctcagcatgacccatgatgttgtggatcctcattggcattgaagtattattaggcactgtaatatccgaagctgtttcacggggctactgcacggagtacagacaccactttagtatcagggactgaaaatccatgaaactccgtgtccttttctgtcatcgatttccaattttcatatggttgtacttattgggatatcctgcaggctattcgacgatatacattaatttagcaataggaaacacctgagatatccaagttgatccctgctgttggtgtcatttcgcattctctcacatcactcctcttcttttctggacttaaccattcatcccatacagcaaagagcttgactcggcaatatgagactcggtcaaattgccttcctcgccgttgtggctggacccgcagcagcagttcctacaaagaaccatgcaaagagagcttcgccctttcaatgtgcgagtccatgagttccaaagatatttctgacaatccattgaccaaatttctcgtatagggttcggaacaagcgagtccggagctgagtttggcgaggaccaaattcctggcgtctatgtgagttggccaaacatgtcttcggagaagctccactgataaaaatcggaatagggaaccgattatatcttcccggatgctagcaccattcaaattttgactggaaaaggaatgaacatcttccgggtggacttcctgatggaacggctggtaccggactccatgacaggcgggtttgacgatgcctaccttagcaatctgaccacggtatgttgtgccgtatctatccctaagggaacaagcgcatactgatctagtagcagacggtcaaagccatcaccgatgcaggatcccacgccgttcttgatccgcacaactatggaagattgtaaatattccatcgaaccaacgaatgaatcgaagctgatgagtgtacatagcaacggcgagatcatttcgagcacatccgactttcagacattctggaagaacgtcgcaggcgaattcgcttctaatgagctggtcattttcgacacaagttagtaccccagatcttgagtcgtatcacaaaaagtctgttaaccgcatcatgcatagacaacgagtaccacgacatggaccaagacctcgtcctacagctcaaccaggcagccattgacggcatccgcgaagcaggagcaacaagccaatatatcttcgtcgagggcaactcttggaccggcgcgtggacctgggtcgacgtgaacgataacctgaaggacctgaccgacccccaagacaagattgtctatgagatgcaccagtacctcgactcggacgggtcaggcacgagcgagatatgtgtttcgacgacgatcggagaagagcgtgtgacggacgcgacacagtggctgaaggataacggtaaggttggggttttaggcgagtttgccggtggtgtgaatgatgattgcaaggcggcgatcacaggcatgcttgattacctgggtgacaactcggatgtgtggctcggggcattgtggtgggctgccggaccttggtggggtgattatatctttagtatggaacctaccactggggcagcgtacacaggcatgttgtcgacgcttgagccatatctggagtaaaatctctggattgaggcaaatgcgaacatacacacatagtccatatgcagcatgtgagttatcgagttcggttgctgtaatatgcgaaagaaagaaagaaagcaactgcttttcgaaatgaacgtatctttttcttaaagtattagagaaaaagactcaaatttccgatggccatagcttatgtatcagatgtcttgtcgggcagcgcaaaaatgggtaggtttgtcagagcgggggggttcccaaattcagagaagtttatctggaaatcataaatatagaacaaggcatcaccattagtggaatttgccctgtgcagagacagcggagtgcgagtggaatggtatacaacataggacaggaaggtggggatacggagataatgccaagagagaaatagaggagcctggcatctatcccgtacatacggtactccatacccaggcttacgcagtcttgaggcggagagggaaaaatttgaaatgatccacaaggctgatcagagtcgaaagggtgacgaggctcggattggggaattgcctgttttggccacttggaatgaagatcctggggcggtcagaactagatatgacgaagtttgatagattggatctcgtgtgtacctacactgtctacgttttatttaggggtatttccgacagtgtaatctgcctacactatttagaaaaatataatctttacggatcaaaagcatatccaaaatatagttcttccatctgatctgactgtgtcgactgtggatgtagggataagcagatgaaggaccattccgctagacctaaataggactagtcaagcccagaaatagaagcaaacgtggccctggcgacgtgaccgctcagccctgattggcccgctgatcctgcgcctccttccctgggaggctggagtttctgtttagtgtgaggctgtgcgttcccagggttgaacgttgtttacgaggtctattgggggcggaggggcatttatattaaagtcttccctccatctcacctctccacttctcatccatctttcacctctttctctatattcccatcttccataaatacatcttcatcatgggaaaagctggtcgtgtcgcgtgtatcttcacgccctatgtcttgaccatcgcatcattgatctgcatcattttggtgggattgggctgcacaaaagccagttcttcgaccttgaataatctatacttcattcgtgtaagtgatcaaagattctacatggttactgcatccgctaatgccaataatctatagctcgacctctcgaacataagtgaaggatcggcacttacatcagaaatcacagatcgcctcagtgctgccggtatcactgatgtcactgcggatgaggtctcggagaccatcgaaacactgcaggctgatgccaatatttctgatttctacgacatcggtctctggggttactgcgagggaaatatcaccaacagcacggataccgtctccagctgcacagaccccaaggccgagttctacttcaacccgtctacaatcctaggagtgagcgagaccgagcttgagaaggagattggcagcgacctgaagaagaccatgaaaatttacaaggctgtctccaagtggatgttcattgcctacctagtcgcgtttattgccacttgcgcccaggtcctgcttggtatcttcgccatcttcagccgctggggcagctgcgtcaccacgattgtctcgattgtttcgttcctcttcacccttggcgcatcgcttacctcgactatcatgttctcgatcgcaaaaagctccctcggcacagtcctcgaggtctatggtatcgatgtaagcctgggtaagaacatatacgccgccacctggctcgcagtcgctttctctctgggagccaccttcttctggatgctcagcacctgctgttgctccggccgctcgccctacggccacagggaccgcagcccccgcggcatcaccgcagagaaggccccctacacttatgagcccatcggtgccgcccacccacccttcggttctcagcagccccttgttccccaacacggctacagcacctcttaccctgctgccacccacaacaacgatatccccatgacccacaacaaccagcagtcaagcgcctacgagccattccgccatgcttaaaagattgggctttcaatgactgtgcaccccttctgaagcgattttagattggcgataccaaggcgttctcgtgtttgttatttttttttttttgcatgcttttaatgtccatgtccttttcctgattcttgatgatcatcacgccattttgcatagcgagactacggtctctatgggagggaacatctgcatttttgtatatatttttatgatcctttacgaaggaatcattagtatctatttgcctgcaaattgtttcaactacaaaatccacttccaaataacatctggcttaatccctctaactttgtagaaccacttaaatgcctgatttgaccaatcacaaacagcttacaatcagaaatttcggagtccccaatcctactcgtattgacctagtttgtatgtatatacattgcagcatggaaatagctcctctagctcatgaggctcatttctttgtgggtccaaatatacatagctccaacaccatcgtgaaataagacagacagtgacccttgcgagggaggtggagagcgttaggggggcaaagctaggatctgcagcgaggctcgagccctgttttactattagtactgccgatctctacttcgctatttgcacccgtggaccgatgtttgatgctgtcagaggcgttgagttgggccccacggggaatttggcataagaatccgattgggggagttgtctgacttttcactttacatatgaaacatgcgcaagattactattccgtgaattgtcgggcttagtacgcagtactccctatggaatacaatataggtattatcactagtattacggagtaggaaagggggtttcagggcttaggtcttctggttcaatattcagagtagataaatgataacgtacaaaaaaaaataaaattatataagacggtataccatctcatattatgcttccttctgcttgaataaggatgaaacgaaatggtatttgttgttatgcttgccgttgcgctgagccagccgctggcccgtggaaaatggagatacttggtgaatattataatattcaggggccagggttcttgtcttgatctcggttgtaggtggggtaacgaatgacacccttctcatcggttagaaccctaactccaccgcgacggttgagttcctgaagaacgttctggtcttggcgagcccagcgcttgaacggtgtgtcggggtcatcggaccacacaggacctttgggccatatgttccgaagagaccggaaccagggtcttcgtcgccttggctgctcgggctcggaattattgagagcgcccagggccgcaggcggggcgggcggagcgggagagacagagatgcggcgatcgtcagtgtcatcgccgagttcaatactggcagtctcatggtgagtaccatctccttcctgtgtctcctcgatttcgtccatgtcggcttcggccatgtcaacgtcgttcggatcaggcgcgaagcgaacgctctctgcgtcggatcgcgttgcatcggttgtctcttcgtcatgactgaagaacacaggcttttgatcgtcgctgctggtgatattttgggagccaatttgtccattgaaagaatcatctgcttcaattttcacaaccactgaatccgagccggtgctaggataggaggatgacgatgactgcgttgctgttggcatgcagacatccggaacaggagcatcaccaaaggactgagcatggaggtttgagaatcttcccacaagactggccgtgaaagaattattggccacttcgctttgtatcgctttatcctgggttacatcgccttggattgtcacttcatttggaaccggcgaatttcttaactcggtactggtaggcggaacaaactgagaggcgactatgtcaattccgtgggctgttaggcttctctttttgtggtgagggcgtgagaatctcgagcaaaaaaaatcttcgtaatttagtgtcttcgaattttcaaatatatgctctgtaagatagcgcgagtactcctccaggtattggatgacaaagtcatcccataggaacgatcgttggagttggcccttttgtcgtactgcctgcaatttcgaacacatctcagtgaagtgagcaaaaccaccagcgtacggcgaataatcattgcagaatttttcatagactgtctgtgcttcggcgtactcgtcagaattgccgatagagccttgtcgccgtgctaccaactcgacatttggaccgtgagccgccttttggccagtatcaacaccctcgcagcccggagggcgtgaatatttagggcgtttagatggggactctccgtgggcagcgaccgaggtggtgaattccataggcgacaattccggcaactgcgatcctccgtcgagtcctcccggagaatgttggcttagttcatgaagttgagacgtggacagcgagtgagacccgacatcaggaaaagatgatgggttgtctgagggatctaaacggaagatagacgacccacggtgtcgttgaacaggtctcgatgaatcaagtacgtctggggacgactgaactgtagcctgtgagagtgcatgtacgctgcttgtttgagtctgagtacccagcacatccattagcggtggttcgtcttgggataaatcactgtgcccgtggttatcttgcgagcggtaggtattcggaattcgggacgagggggatgtcttagtagcttcagagtatggctgctgagagctcgggagctgaaccccagttctctgttcgctttgtttcccgggatttagacgtgtattattggctgcaggtgtctccaccacttggatagtcccccctgcaaatcttggaagcgacggtcccgagctagtaggttcctgctcaggctggctgcttaacggaaggcttccacccagagcgaaaggaacatatgtttccatctctggctcatcgctctcatcgctgcttgattcatcacgcatttcagatctaagtgggatagttttggcgggtgattggtcatgctcttgtgttatgcttgggggttggtcattgaccacatcgaccgactttgaagcgttgtgctcttggggtaggtcaggatcatggtccaaaggcaatggacttctgggttttgttgttacttcctcgggagatggagaacattgttgctctgctgttctagtatcgtttcttgatgagacaatatcccccggtcctggctgaggagcactgcaagacccgttcaccatgtctacatccccattttttatagactgatcaacgctatattgagtgccagttggcggagaagctcctctgataggccgtatgtatcttgggggagaagcggtgtcccgtggaagaacatctcgagcaggggccctatcgggggacggagaccatggtatgggagatgtagagggctcttgcggtgtagaggtaagcgcacgttcagatagtcgctcttctgcttctgcttcttctgccaaatgttgtcttcttcgtgcaatattgttccactgcgtcaaaagacgaggcggtacatggcatagaggtgtagatataccggggtcctgagggatccatttgagcccttccaaaagttctgcttggtcttttggaatatgaacttcgctcagaggtattttcatcattccatcccatggacttgttgcggacgggcacccgatgtctgtcttggtgtttacgatctgtaccctaggaggcgattgcatgagcttgttttgtactcgctcggatttatttggcggaatcacctcaccagcatcaatgcgctgtcgctttttggagggtggtgtatttgaactttgccggccctgcgagctcaggccatcattgtgaattagcacatctgtactaccacgatgtcttttttttgacggctgaatgtcccccattccaacattgcgagccgggccatgatcatccgactcattgggaggttgtgtgcccgtacactccgctataaagtctaccacttctttttcaatatctgcgtaagattgattggtaacatattcactagagcgcgtcgaattagcaatgttgctatcaagtctccgaaacgagggttctatttcggtgaaaggtctgccaatttctggtgccactgacattcctgtatttggcaagggagaatgcctgctttcactttcaccaagaggtagtccgtgggcctcgagcacctctctagtggctgcgtaatttgtttgaattggatgagaaggagcgagcaatcctagaagatctgatgacccgttgagggaaacacgactggtcattgcattactcttcggtgcgccatggcgcatattagacgggggttgggagaagagcaactgtgatgccatattggtttgagaatgattgagcggcatagttcgatcacgctgagaagcaaatgggtcggtcaatctagcatttgtttgatcgttggagctagcatgccctcgcgtcttttggattttgtcgcatgccatagtcatcagggctctaagagccgttgttttcttgagctttggtttcggtacatcccctctcggaaccgcattcgggtggatagtaaaccgtttaatttggaggcagacatccggggcaggtgctgagtacgttaaaatgagcttgatgtcgaaaagttcaactaggtgcctagggcctcctttaagcgacggtggacagggtgatgttgctccctgtacgtccggcgagtcttgtaaaataatcgcatcaatctggttctttgaatctgtaaatgtggcgcaatgactcttctctccttctccccactaacagacgaaagacatatagttagcaacaactctttcctttttttcgcattcgctcggggtattttaccgatacaacaacggctgtcttgagtgtcggcttgcagaaactgaagctgagacatccgtcgatatcttccacctggacttcatcttgatcattttgaccgatataaaatgagagacattggtcggccaaagccgcgatccagggacttactggattcatcgtgcgaatccagccttgtagtcaatgttgtacacagcatatatgtcatagctggtaagagtagacagtgggcatgggatgtttgtagccccggagtttgtagaaaaagagcgaaggtcgtcaaaaaaacccaccactcaaccgcgtcttatcgattgtgacctgccaagacccccccccggggggcggggcgcgccccgcctnnnnnnnnnnnnnnnnnnnnnnnnnnnnnnnnnnnnnnnnnnnnnnnnnnnnnnnnnnnnnnnnnnnnnnnnnnnnnnnnnnnnnnnnnnnnnnnnnnnnnnnnnnnnnnnnnnnnnnnnnnnnnnnnnnnnnnnnnnnnnnnnnnnnnnnnnnnnnnnnnnnnnnnnnnnnnnnnnnnnnnnnnnnnnnnnctcgggaggtcgggacgcgcctagcttactcagcaccaacacgtcattcaacgtgcggagggcaaagggacctattctttttttctttttttgaaagaagtttctttgatccgatcagtctgacagacgctcttatcgaccctcgatactcttttttctgccaaactcgctaaactcgccaaacctgagaccttcccgcagttctgcccgaatggtcggctataaaggtgcctagatcctgtgcggagatgatctgagacctttctgcctaacttggcgatggattctcagcactcccaggactcacaaagtccatcggcgtcttccaattcgcttcctcttgagcgacgcggatcacgcagctctatggccacgactcagaccgagcgagaatcgatgaatgcagctctggataactaccataatgcagcgtatcagtccgagtccctcactctcttcaacgattttactagtccgccagccccggctgccatatcggatgagaaaagactgtctgacgaattacaaggtggactaagcggtctgtatagtcgctttaggacttccgtcggaggggtgagggatattgtcagcggtggcggaaaaactgcagacaaaaatccgacagagactcctgcagtcaaaagtcttgtttcggagaattcgctggcaaacccagtctcggacgtggctacaagctccgctgattatctgccatcacagcccaactcgtcacaaggatcaaggctacactcgcctgttgtgccagacttccacacttatcaagaacctgtgcaacaagcaaatataggaaagagatcaagaatatcctcgaaaaatggcagcatatcttccaaggcctccgtgtcaccatcccttggaatcaagcccagtatcgcaccgttaacgaaagccaccggtagcgccattgtggcagaccctgcagtcactcaacttcatgtgaacgtagtcgggaaagctgactgctcaagaagcagctccattaatggtcccttccagggaatccataatgcaggatcgacaagtatcggtagcaaggaaggctctatggatcttcccatgagtcaaacatcctcttcattgagtcagaacctttctaattcaccagttttgtctgcaaagatgcatgaaagccatcatgaggaattcaacctcacagactcagcaacatatactcctgacaaccagtctcggaagtccgtctctactctagatcaacaaaagctgcctgaacactcgtctcaatcagctaacatgcgagataccaagcaatctgagccagttcaggatcatgcatctcagcatccggcagaaagatcaaaatcaagagcatctttcccttctgaagagccgaaagcttcggtttctacgtcaaatagtttatcaaaactttcctctcacgactcagtaccgtacaatgctgaaaaactcccaaccaacatggagacaaccattcctcgtgacagctctaactccaatgagcctgcaaaggtcacagctcccggtagatccaatgaggagtcaacgccctcaatccgagcagcgcggctgcctggctacgtgatttcacgggcctccacggccgagacgaccacaacggtctcctcattgccgcctttgaagactgatttcgatcgggctactagccaagccaggcgtcaacctcccgccgggggcgacggtgttttatcgcagctaagaagtaaactacttagcagggatttttggatgcgggatgagaatgccaaagactgctttcattgcggagaacctttcacaacatttcgcagaaagcaccactgtcgaacttgtggtcaaatctttgattcgaaatgcactctgctcatttcgggaacacggttcggacagcctggtaatattcgggtttgcaaaccctgcgagaagatgatcaatgcgcacgatgatgattcatctgaattctccgacagcgagcagagccccatagtggccaatcctcgggtttctgaactcacctggaccagtcctggacgagcatctgcggatgacgatgattcatcttcggttgtgtctcaatcaatcgatcacgttctgagaaccccgacgatggctataccggccacacgacgtgctggagagggacataaccgccgctcggcaattcttgaaattgattctgatcgccctttaacacgacctacctcttcgcgctctctgcggtcttcgctgggtggaagaccacactccctcagtcacaaacgtcaccactctcgtcagcaatatattcggggctttaagccatatcatgaagaccgagcccccttccaacgccgacatgcagatgacatagacgctgaatctcgactccctgcctttcataaagataatatcattgaccctgaccttgctcaatatctctcggatgatgcatccagtggcgatgagcaacctagcctcctgtctgcggtctctgagggcactctgtctaaaagtgggggtgaaaatgagaaagcatcatttggtgggcttctcgctgccatgaaaaagggtagatctgcttttggagaccgaagtactcccagtacgaatcgagacgcagacgaagccagtatcacgagttcaagagccgtgaatctccctcgtttttctcgacgtcgaaacttgagcgttactagcagttatcagccgcgtcattcacccaggacatctaaggacaatatgccccctcatgacaactcagcaccagtcatatctttacccgagaatgtaaagcagggtgggttcaagatgactcgaagttcatcaatgagaggcattgatgcgccacctgtggaattgaacaaagcgagtctggaacacgtacgaaagcttctccatcaactgcttgtagagtctgctgtgccaaattgcgacagctgggaaaacgctttgatgccaatactgttgaaggcagcagatgaggttgatccagatgtccaaaaaggggatgatatggacattcgacactacgtcaaattgaagaagattccgggcggccgacctggtgacacttcttatgtatcaggactcgttttcaccaaaaatttggccctgaaaggcatgtcacggaacatttcacgtccaaacattttgatcatcacatttcctcttgaatatgctcgtcaacaacaacattttatgagtctcgaacctgtcattcgacaagagcgtgagtttctagaaaacttggtcagtcggatcgcagcattgcgtccaaacttgcttttggtcgagaaaactgtttctggcctggctcttggcctcctcgagcaagctgggattgccactgcatacaacgtgaagccatctgttctagaggctgtgtcgagatgtacacagactaggattatgacatctatggataagctcttgacgaccacattgcatagtgaatgcagcagtttcgacgtgaaaacctacgttcataatggtcggaagaaaacatatatgtacatttccgggtgtccgaaagagctcgggtgtaccattatcctgcgtggaggggatgatcaagtcctcgggaatgtgaaaagcatcactgagttcatggtctatgttgtgtacaacctccgtctagaaacaaatcttatgcgagatgaattcggcaggatatcaacctcgccgacagaagaatcagcagttgggcacgacaaagacaataaattcaatccgcagattaccactcacgaaggcaacgcacatctagtcgacctatctaatgctcagcagggagccaacgagaaacgtggtgatatctctgatagccaaattcttgttgatgccgatgctgcaaaagttcctgacaacatcccaatgccgacatactataacgatatggttaaggattacgagacaaagattttgtcggcctctcctttcgtaaaattcgaggctccgtatctcctaacgcgtgcgcgcgaaatggaacgcaggctttcgtatttgaagtctcttcgtgatcaagaccgcaattctaaccagatcaccgatgaaaaggtcaaaccgcaaaagtttgtcctcatcaccccggaaatggtccatcaatcaccgcaagatgcgccagcaaaagtcaaggaagtattgcatgctgcgcatgaagccgagtacgaccgggctctttatcaccatcaaactcaaaagcgccaatgggaagcctatgtggcggggaattccaacatgtttgatccttatgcgcatcagaatttggtcattctctacagtgttgtgtgtacaacaacatcagtcccctgctcagggccagatacctttgccttggagttctataatgagcatggagatgacacaatcttcgagtcagatctcacaattgggcagtatgtagaggacctttgtcacacagcaaattccgtatgtaccgtcaacggctgcgagaaacgcatgttcgaacaccaccgccagtacgtacatggcgaggctcagatcagtgtcctggtccagccttatccttctaagctccgtgggctccataatgccgtgctgatgtggagctgttgcaaaatttgcggcaatgaaactcaagttatgcctatgtccccgagcacatggaaatattcattcggaaaatatctggagctgtgtttctggggcagacacttgcttgctcgtactggaggttgctctcatgatttgcggcgggattatctccactattttggctacagggatcttgctttgcgggtccaatatgaccctattcgtcttctggagattatcgttccacggcctcgtgtcacttggaaggtggacaacgatctgaggctgaggaacgaagtatatttgcgtaccgagcaacgtctcaacaaattcatgatctctgttcaagaccgactgaaaggcatcaatgccgagagtgttgttcccgagctactggagagctgcaagacgaaaatcgaaactttgatcaagaagagtcatgaagaccatagctctttggtccggcacttacaagacaaatacacaagttctcgctattgggagatcataccgctgaatgaggtcctccgtgcagttcaagaaaaggttgtcgaatgggacacgatatttgccgatttcgagatgaactttttcccatctgagaaggatatcaagcatatggcaacactgcaactcaaaaagatcttcctcgacaaagatgcaacatcggtttctacagatgatgccctcgaaactcccacggatgttgaagatgagaacgaccaggaagatgacaggccacggatgatgcgacgtatgacactttcaccggagaaggcacaggatgtactggtctccgttgtcgaggagcacactggcaaaaagcaccgcgaggacctcgaagaagtcgagttgcactcgcctccagcgtcggctgaggaagcaactttatcagtcgatgcaattggtgggacgaggtcttctccccaggatgaggctgtctcacaagaagtacgacatctcgacttggctgttcctgtcggccatgctagcatttcgaatcaatctcctataaacaccgatctccctgtgatgatttccggcgacggatcatcggaattatcaccaccggaaagctctaggattcccgatcaaggaaccaagaatggaaccgaagacagcgtatctcctgacatagcaaataccccagtacgtcggccttcagcaataccgaggcctaccgagctagcctttcgacgcaccggtaagatacggtctcctccgcttttgcgtactcagtctcagccagctgcgaatctaccacgatcatctcacagcattcaacttccggggttgaaactagcgttcgccaacccatccgatccggaaacccctgcagtgcaatcaccaacaaagtcatcggatagaaagctgagcgatcgtttaggcttaagttccctcaagagtgcccgatttgccgcgggtcagtcgcttattccacggtcaaggggaatatcgcaggtttctcacctcgccaggcattttgagcaattgagtcgtgaattcgagaaagagagacagcgcgaaagacgtcaacgcactgccaagggcactcagtcccgagcattcccattggcgtcctcgaagcccatcgtggaggtctatcgaaatgtacgagaggctgttgaagaacgcgaaccgccggttgatagtgatgaatatctgccctcggctccccggatcccaatggatgacatgagtcgcaagagtgatgaacttacgcatgatcataaaactcataatgagccctctctggcaagcgagtctcccgcagagcctatgaaagtagacagtgcactctgtcctgacgacgaactcttgtctggcgacgaagcagatgatcaccaaagtgatgaggatcaaaacatagttgaagatctccatccagtagattcacatgaagagaccaaacagtcaccagaggatgattcaattgatttcaaagaactccctaaacatgagcgtaccacgcttctgaaaatgctgacaaacttctggtctgaacgttctgcaagtggttgggcgtctcttgactatccactcagtgtcatggatcatgtctttgctgattgcaatattattgttcgcgaggatgaaccaagctctttggtagccttcgctttggactcttccgattacaaagaaaaactttcaaccattcaacagcggtttgacgagacggaagaacaaaaaccagatgccggagacgacatcgaggctgcgaaggaagcacaggtcgaacatgctctcttgcgacctacgggcacacacctaaagtatcaattccaagaaggtcaggccaagatgctgtgcaaagtgttctacgccgagcagtttgatgctctgcgtaaaaagtgtggtgtggcagatcgaatcgtcgagtcattgtctcggtgtgcaaagtgggactcaaagggtggcaagacaaaatcgttgttcctaaagacccttgatgaccgtttcattctcaagtctctctcaacgattgagacgcaggctttcctcaaattcgccccggcgtatttccaaatcatgtccgaagccctgtttcatgaactcccttccgcaatcgctaagatgttcggcttttaccaagtcattatcaagaacccagtcactggaaccgagttcaattggttcttgttgttaatggagaacttgttctatgaccgtgtccctacgcgcatattcgatttgaagggctcaatgcgaaaccgcaaagtagagagtaccggtgaacgggacgaggtcctcttggacgaaaacatggtggatttcatctatgaaacccctctctttgcccgcgagcattcaaagaaacttcttggccaaagtgtatggaatgacacactctttttgggtcgtcaagacgtcatggactactcactcatgatcgccatcgatgaaagccgcaatgaactggtggtagggatcattgactgcattcgcacctacacctgggacaaaaagctcgagtcctggatcaaggacaaaggatttgctggcggtgggcgaaatcgaccgacggtcacaagtcctagagaatataagggtcgtttccgtgaggcaatggctagatatgtgcttcaagctccaaggttagttgatatatattccctcgggtgtgcgactgaatactaacgagtttagctgctggcatcaattcccatcaaatgcgatgtaccgctatgagaaccagaacactgaagttgagactgttgatgggaacgggtttgtggaagacactggttactgatagcttcttagacagtcttcgttttgatctgcgcccatgaactgcttacattaatgatttatgacctgacgaattttcatgagacggagtgcagggtgatgtttcatgtgttgggaatttcttgtcatcatgccttaacattgcctctagacattcatttcataccaacattctcatagccagtcccgaatctttttgcctacctctgtacgcagtaacacgtacactgctagaggcgcgtggcctttttggctcatcgcaggcgagcgttgggccggatgcgctagccatgctagtcgtggcattcctgaagatgaaccatggccggtttcccgggccaaatagcttgggtgaccagtttcttgctcttctacagttctatggtactcaggttgacctcaagtctgtcggtgtcgccgtggatccccccgggcttttcagcacagacatgttgcctgtagctcgcggggctgatgaaactgcccaccagcgcggtcagcgttctctgatcaacgtcaagcggaccgctgcgggaaagctcaatatgcctctcttcatatttgtgttgtgaaaagcagcaccctgcaagccctgtcactcttgatctcctgctttccagtgcgatctcgggttaccctaatattagaactttagcaaactgccgggccgactggtttctagatgtgcaagcggataagccatgagaagtcatatttatgagatcttgttttatgccaccaattaattcgagttctcatcggtttggggagaagtaggaagttatattgttgcccaacttccaaagcgttcagcataagtagtctatatattttgaaaaaggcaaagaaatccgttaattaaaggtatgtaggtgcaaccaggagacactgatttgcgtagaaaatggaacggccatcgaaatgttattcgataggccaagggggctgcctttttaggaagggggtagctcatgcgcttcaccaatgagaatatgccgacccttgcccttgtttcggtggagatgattcgtattccacaaccacatcatctttgcggtggatacgccccagtgggaggctatttttcccgtggtcatcgttatgaaggatgctctcttgactctcttgatcgtcgatgttggtgaaacagaggtcatcgtgcggttttgattgcttggagcgatggaatgaggaggggaaattgctgctggtcttgagctgatcgctctttccttgactgtatgagcccattgctcgtttgccgagaaggatttcgaggagtggttgtaaggtggggatgcacgatgctaaaacaacgacgtcggcctcaatactagacggagaacaaagggttagatcatataacaagaggatcggatggaagatgcttacttggtccacatgacaaggtcggcagtaccgtcttttgtttggtcagcctttggttaaagcgagaaggataataaggacatacatgtgtagtcggatttgtcggcaagtccatgcagctgggtacactttataattgccatcgcagaagcacttcatcgccactttggtcagcttctgggtagtatggtatgagttggggaggtatcaacttacattccaccaagccctaaagcagcacatagcgcaattctctttcgtagagacatttggagtttcaacaagacggttgttggataaacggccagagttagatcagcaagagcagagatagctagaagtatggggttaattccaagacatatgtttcaaggggatgagacctacatccagtgaagatagcaaagtcaatgagtaacgctgtacttttgcacttggcgcctgctgcgacaagttcaggcttccacaatgcctctgctggatcgcacattgtgaacaagattataatgcaggtaatagacacgacgcttgtggttccaaccatcgtccacagcatcgccttatgcagtggtttggggttcaagatccgggtcaacatggaagtcacagcaatcttgggaagagtgaaagagaaaatcccgaacaaaaagctgactgtattgagtagaatggccttctccagattgtccgtactcaagtacttggaatgttttccataacccacacccacacctgctgtagagattccgcaatatgcaaaccccattatctagtacacaagctccggttagattcacctcgaaaggacagaaagcctcttaccatggaaaccacaatcaaataatcatccaaaccaaagttccgcagtagcttgagccggatgtagaccctagccacaaccataacggcagttagccccgtcaaggtccacagtacagccaggatcttgggacccttgtcatcgtgaagatttccggcggtgaccaccattgtctcaatcttgatgcagaaacagcggggaaaggccagaaagtgcgaaagagtgcgaccccgttatggagtagtttatatatagccctacaggaaagggcctgctaaaaccaacaatagcacataagagttcacatgagatatgtacatggaagtaagtacaggattgatttcagtgtgccattattcgatcagtcactccgtactattattttcctgaaactccgttaaacagccaatccttcgagattttagttgcgatgatcgtcctattttggtaagcgcattgttcatcattgtttgacgatttatctccgaggtcatcgtctacaatagtattatagctagctcgtttttacggagtactccgtagtcggataggggtatgatccctgtcacgctagctagttagtcgatgccgctaaacgaaatgacagcagtctcggaatgggaccccaatacccggtggacgggcctgcatcgtaggcagtagcttgagatactccgcgtgcactgccctcatgtcgaataaccggggttttatttggaaatatctggccaacctactccgtagtctagaaagaaacaattgtaccatgcagtgtagatcttgggtgaagtctagatcatattctgggttctaaaaatttgctgacatttcaacctggattttacgagtcccaccgtaatacgaagagagtgggtggtttctaatccaccagctcgcctcgtgggtcttttttttttcaagtccaagttgaaaatagacaaaagtacggagtacggagtactacggggttaagtacgtcgtcgaatataaggagtgcagagcacgaagtagcccgtgcgaacaagcgaaatatcgttaaaaaaaacaccaaaaaagcgcgattagccgtctcgatgtgggtatttggtgtggatattaatgtattccggtccattgagccgattctatcagaatctcagccctctctgatcaattccacatactccgcttatatatttacgcgattcgttgaggacaaagtacatgccttgtacttttgcacttggatggggaattagctttagccaggtcattttagcacatcaactgcctataacgtataatgagtattcctttgggacatcttgtgatagatccatccatggatgtgggcccatccgctctaattttattgtgatgatccttgagttattcggtacttattatatacataggtacaacataccaagtgatattcttggcttgggcgagccgttagacaatctgctcgtttgttacctgaataggaagaccgttgaaccgttgcgtctccacttcctttgtcccaactggcaccgacttactccgtagtgtcggtggaacctatcttctagcacagtgctccagtgggatgaataccagccggtcttcatgatagcggatccatatgattgaacccggtccaaccgttgctcagctggcgtagcttcattaaagaaaaggagacagtgactgtagcttgtttcaaaaaaggggatacgtagataatgaatgtagtatatttaaagacccctggagtacttttgacttggatcacttcatattcttctgcactcccacgctatctatattacattacattcacaatggccgacattgcaacccttacattgagtgaaaccacccaagctaatgggaactcacacacggagggcacaatccatgcaactggagattgccagaccagcggaggcctcgaggaggccttcgtcgaccgcgtagcaatttccgccaacacacccgagctcgttcctggcctggttgatcagattgcttcccttggcaaagtcgccagcctgcaagacaacaccgatcgaacaacccttttggaagccgctcgatccctggtctacgcacttgagaccccacgtgaggctatgatcagatactgttggtctcaggtaaattcccgtgcttctaaggcacacctttgtgctgttgacggcaactaatattgatatcatagtctaccctttacgcttctttggaaacaggtgttgatctgggcctttttgctatcttgtccaaggatgacaagcccaagtctgctgccgagttggccaaggccaccggtgctgacccagttcttcttggtacgtaacttgccatccgtcctgtgctttgtcggtacactttactaactacatatttgtttagctcgcattctgaagcacttgtgcgcaatgggagttatcctcgagactggtcctaatgaataccgccgaaccggagtttcaatctcgctaagcttgcaacgatacaatgatgcatacccttgcatgtaagtcggaatttgtgggcatataatccaaaaggatgatattaactcattggttaggactaattgcatcaccgccggtgtgcttgctctacctgcccagctcaaaaaggacggctataccaacccatcaaacggcaaggattgcgctttccagcgcggattccgaaccgatctccacttcttcgactttatgaaggagaacctagatgccgctagccagtttaacaatcacatgtctgcctaccaccaaggccgtcctagctggatggatgtcggtttcttcgacgtgcccagcctgttccccgatgtcacacaggacgatgttctcctcgtcgatgtcggcggcagtttaggccacgatatttcggagtttaagcgcaagtggcctgatgctcctgggcgtctggtgatccaggatcttcccgatgtggtcgctcaagccaagtcaggacagctagatccgtcgatcgagacattagagcatgacttcttcaatgagcagcctatcaagggtatgatttccccttctatgaccccctctcaactcagatcaaaactaatattttcttctaaaggtgctcgcgcctactatatgcactctgtcctgcacgactggtcagacgataactgccgcaagatcttgaagggtctcgtgaatgccatgaagcgcggacacagcaaggttctgattaacgagaatgtcatccctgataccaacgcgtactgggagacaaccagtctggatattattatgatggctgatttcgcttcgaccgagcgaactgaagcccattggcaccaactggtgggatccgctgggttgaaaatcacgaagatttggaatgcccagaaaggagtcgagagtcttatcgagtgcgaattggcatagatgccacctaggtaatgggatctgatactcaggatgatagattgtactggttttgaattaatggatatattttagcatatgtacgggccgcgccacaaattgtaagagccgaaagcaacaggaaccgaaaaaaaataataactaaacaatttgttcaatttggaaggtagcagtagtgttgatacttgataggcatacaacatagacagtggattttagatgtgaacctcgtatactagtacaaagtataatgctgacggtaactcgggtggtgatcggcggccgaaggcccgaggtccaggtggtgagttagaataaaaccggttcaaggccgaccgctggaatcaccgcctttgtgtttatgttgctgtggtaattccaatacaatcacattgttttttttttaatacattaggtataatggtacatactcctactccgtactccgtgtataattacctatgagtctagaacaagccttggagaggtccgtgggcccctggacccctggaccgaccgtggacttacccgttagtggggccgcccagccttccacggttgggacgtaacttcccttttcgtctgcttgctttctctattctttcccctccccctttctcacacacgcacattctctctttccacagattaaatgcagatataataagaagaacaacacgaaagagaggaaggaggataaattgtcatggcagagggcgattctcctatctcggaccccggaacccccggaccccccgggatctccttctcaggtgatcggcaggcgcagaaacaggctagtgaatatcataaagcaaaatgacctccctcaactccgtcgattcatcgcctcatgcaatcccgaggatgtgatcgcccctgggacaccctacttagaggacacattgttcaatgcagcctcgtacggcagtcccgaggctcttcaaattctcttggatgtgtatactacggccccggaagttgtcaagaggttcaaccccaagttccgtctgctgctcgacgcatgtggcgcggcaaatattgatgtagtgcgctttatcttggacagtccagaaaatcagttacctctcgggacggtggatttacatcagcgagatgattccggagatacgccgatcctcgtggctgcgggttcgctgatgtatcttgataaagacccagatgaagtagaagatgagggtcttcattgggctgagtggattcgggatcggattgcgcggggccatgagttgattcatcttcttctcgaccgaggctgttcagcgacagatgttattcctcccttgccaaatgatatccctccctggggaagtcaggtgcaagatagtgtgcttgggcttgctgtgtcgagggctaatgggccgttaattcaacggctcattgactccggtgccgatatctaccttaagcatcaacacttccatcatgccagggcaccgttccagttcaggaccgcaaagggtcacgcgtatgatgtcacaacgctccatctagcaagtctattctacaatgctgatgttgttgttaacttgctcttggatcatcaacattaccagaacaataccaaccctgacctggcttcctcctgtgatagtgatgggcgactcccactaccctgggcagctagcggtcctggaggtttttactgtagactcctatataagcagctcggaatcacagagatccttcgactgctcctcgaccatgattctattcgtatcaaccttattgacaacgctagatccacgccgctacactatgctgctataagccacgctatgtgccagcacgttgagtctactatccgcactttactcaaatacagggctgacctccggatccccggcagctctggctgtaccatcctacatctattaggataccactcccatcaaggtgaccctatcaagaccaccctcctcgatttgctcctatcacacggtgtcaatatcaatcgtgccgagaacaagggaaagacggaattgcacgtctttgcccagaatttgcggcaggtctcggcggcaaggttcgtaattgagcaccaggcggatttccgcgctcggaatgctttccaggagacgccctttcatgccgcagcgcgggggtttttgaatgatcatatacgatgtgatgggagggataaggaagtgacaactgcgaataagatcaggcttcaggatgagataatgcgtgttctgaaggaggctgctggggaggaaactgctatgttgatgggtcaaccaaatgcggagggtaaaactccgcaggatttactggaggagaccagaaatcggtggcaggggacggagcagcgcataccaggtcctggaagaggcagaggcagaggcagaggcagaggtagagggctgccagtaggagcataatgacagttcaggaagaatatctatctcataagggtagcaatcgtagcatccacggaccaccagtacatagaaggtcaaattaacgttcaatttgaaagtgttacagctatgtagtttgtatcggactgaaatacgaacaatatctttgttttatacataaaattggtgctgtccgcgctgctaaaggagataccaatgaacacagatctatataatccaagggctaatctctgggaccatcggcaaaaaccgggatcggggcggcaaaggctccacgaaatttgttaacgaatttactagccctgtttttctaattctctttttcattctttcgccaatggcccggaaaatctcaaaaatcgcatcatttcctgctgcagagaggggtaagtacagttcgtcagcggcgtatgcccgggtgatatcgtcatcccctcgggcacatggatgggcctcggtatcgggctcctcgggtccctgcgtcccccgcattggtttttttttgtgcaagttctttttttcccttcattcttttgactgaagtcttcttccaagaggatggatcattctcgtttgaatcgcgcatgggatttagagcagttactccatgcatgcgacagcgactttcgtggactcgacgcgcgacggatgcaagtctataaggactcaagcgcaaaatatcagtcctatgtctattcattgaattgtctggtctctactaactcattaatttgaccggaaagcattaaattcgtttcatttacatgagcaatgtattaaccttccgggctatggtcccagcgcagaacaaacttggcttcgaacgaaacaaaagcgagaaaagaaaaaagaggtatgtatcccatccgcacaccggcggtaaaaaaagcacactggaccattccatcaccgaaagcttaccatctgatgagtttacagaaggtttactccatggtcagaccgaggttctcatcggcgggcaccacacgaacggtgttggtgtggcccataccgccacgccatccctggacacagacgatagagtcacccttgttgatgattccgagcttgagaccgtggttgataccccacttgaggcgacggtcgacatcttcttgccagatcttgacgttgaaatcaggcttggtctcggggaagtagaacggccacacaccgcggtacaagtgggagtactggaactgttgtcagcaaagaacgatacaattcgaacgatacaattcgacttacccgggcagcggtgtcattgcgagtaaccatcaggatggggcagacgggacgatacttcgacacaaggcgggcagttttaccactatgaacttgttagtatgatcttcatacaaaatgacaggaaggttccggctacctggtggtcagaacgatgatggcaccggcattcagctccaaactggcgctgacagcggccatggcgatggactcggaggtttcagtggggcgaggggcaaggttgcgcagctcgtcgaagacgttgaagtgaggaatggcaacctcagccagcaagcaggtctcggacatcatccgaacggcctcgcaagggtagttacccttggcggtctcaccagacagcatgacacagtcagcaccgtcgagaacggcgttggcaacatcggaaacctcagcacgagtggggcgggggttgtatgtcatggactccagcatctgggtggcacagataacgggcttgcccttgatgttgcacttggcgatcatcatcttctgggcaaggaaaaccttgggggcagggatctcgataccgaggtcaccacgggcgaccatgacaccgtcggtcgcttcgagaatctcatcgaagttgttcacaccctgctggttctcaatcttggcgatgatctgaatctccttgccgtcctcgccaaggacggaacggatgtgctcgatgtcgctgccgcgacggatgaatgaggcaaagaccatatcaaccttgttctcaacaccgaatcgcaaatcggcaatatccttctccgagagagcggggaggtctacatcagtgcccggcaggttgacacccttgcgggatgagatactgccgtcgttcaggcacttgaccttaagggtctgcgcatcaacaatctcaatcacctcgaatgacatgatgccatcatcaacatagatgagcttgccaggagcaatcacattggtaatgttcttgtagtccaggtacctgtcgtcacacagttgtcagtccacatcacatgtcaaactcgacattgagggactgtcggtccattcttcggaatgggaatgatcttacatgttcttatcgtcagaagcagtggcgtacgcctcatcagtggtgatgttaagcacggtgccctgcttgatggggatgtccttgtcaccgggggtgttaccggtacggatctcggggcccttggtgtccagggcaatggcgagagggcggccaatctggatacgagcggcctcgcgagagttgtcaatgacagattggtggtactgcaggccaagtcagtgaaggtcttcattcgggtgttgattggagatactgacctcgtatgatccgtgggagaagttcatgcgaacgacgttcagaccggctatggccatgtcagactaactatccaaaaatgctgcccatttccatcggaaactttattttcatacctgtgcggagagcattgatcatcttggcggagttcgtcttggggcctgatcgattggctgttagtaaccggtgttttttttctctccaccagaacctccctgataggttcggcctgatgttttctttgacataccaatggtacagatgatggaggtgcgacggaagttcttcgcaggcaccatatcggtgctgagcttggagtaccactccagcttcatgcggttgctcaggtggtcgagggagtttgtaaccgccattttgagatgatcaacaactgttgaattgatgtagaaaggatgagggaagttctgatcaattgagaatcagggaggatgggtagaagagaaggatgagaaatggaggggaaagagaaaacggatgggtgcggggcggtaggaaaaatgttgcccgccggtgtgagtattggttccatccccaaaacatttttttgtactattgcgaccagaccatatctttctaccaaattaaccggtgaattctgtgacatatgaggatttgactgttcttatttctttctatttgttcagctatattctctatttactaaaagctggaggtgtggttagaggcggcataaacagtccaaacagaaaaaaacaattatatatcaactccggactgggctgaccgcaaaaaagcggaggattaccccgtgctggcctacgcgctgtagattggagtccttggagcgagtaaatgtgacaaatccagacacccaattgatccaggccccagctcaaagaccccagagggatttcggtgggatgagaacgcttatcgatagaccgaatccggactagtgacaatcttggcctcgatccggccccagccacaatgtggattatgtcaggtacaaccagtttcaccagcctcgtctccagccactcgggagacgtcatgtgaatatccacgtgaccgctctttaggcggtcttgatgcctggtctcctcttactttcgcctcttaagcttttggtaactcccggttactcaatatccacagtgttgacacttactactcggaatcatggtgagtgacatttgctggccgatcctggacaaccggggtcctcggaacatagagagcatgccatggctgactcggatgtgctgcaatctagttcggccgtcttacccactacgcatttgatgcggttctccgtgagtcctctaaagtgtccatattgtacctccgaatacagactaaccagtgccttcaaccgcagtctccgccttcctcgcaggcgtcaagcgctccacgggcctcacgtaaatgcaccctacccctcacgatcgtctttttccaagctattgtttattctgcttgttgctcgtcttgggtgcgctcgatatccatgagagaattcttagctaactctattactcctgcgcacccccggttgggtcgtgtgtgcgtgggaacttcatagccccagcctcaattcagacaagatcacagacaacaaagacatcaagaaatgggttgatagctaccttggtgttggagagtggatgatggaccaatcggtggctgttatgggctcgtccgcctggtttgaacgacgccgatgattgaccccgccatactcgacccggagagacaatcggcgatccctttctcgcgacttgactttcggccgtcttgtgtgtatgattgcggactagcggcacatatctggccttggctctgactcttggccctatggcaatgtgatacaatatcagtatgtacagactgagtctgtgttgtggctgtgtctctttaaatcaccggcacaccacaagtatatgctttaaagccgaattgacgagtgatgaccaatttttatctgcgctctagcctccactttcgatcggtgcttatatggtcatggtgttttgcctgttttcgataccttttatctttctgcatgtctatatcatcacacaaatccagccatgaaattagcagacaattcttggaatattctccttgtaggtatgaacataagtcacgggcttgtcagacggtgctacccggatagctcgaggtcactattggtgcatacctaggtggcactgcatgcctgaagctgactgctggcgagctacgagagtttcgttgtgaactacatcgtacgctatgtgaactactgctgaaaagaccaggtttcacccgcaggagactagttaatgattaccgcgggacgaaggtctatgtcgatatcgtggaccttgctgggagctcatctttcctcccaagatggaggctaaacccagttcacgtatcaatcacaacctaaacaacttgataaacgtaacatggaaacaggggggtattttacaaataaaaaacggaatgaagtaaaacgagaaccacaaaaacatgccagtcaatcatacaatacgtagttagagagcgtcaatgtccacacggcggtagtaagagacatggcccatttccttccagtaatgagccatgtggtcaggagaaataaggatcagttgggactcgatgtaggtgtctggcaaattacatgttagacaagaccgttatggtgtatctaccaaggcagcttaccgtcgtggaacccaagtccagcgacatgaccgcggcaacgcacaatccgggcgccaacaaaaggctcttccgtcccgatactaataaagccgctggcgccaatgtcgtcggcaacaaatgagtactgtccacgaggaacattggggtcacctgtcagcttgacagccagcagcggacctcgatgtctaacatcctcctgggcgtcgattatcttcgactcgttttcggaaccaggtgctacggtcgttattttatcctgggagacaagcaggaattcacatccatgggccgaataatctccaacccaaatgccctggtagggtttcgcttcggtgggggtgtaaaggacaggatcgagagttgagaaggttagacccggttcgttcggtgccggagacgtaagctcttggtttgcccacttcctgacacggaagaaagactccgacaaatccgataaatatttcggtattggcggggacgagtccctcaaatcacgaactgtacgtgcattggtctggatggttcgtggtggccaaagcacatagggtttgaccctagattcgctatgtttaaatgaagagcaaagagacagcgaggtgtacatatgtcgggtatccgaatacattggcatgtggcgctctggcattgatttaaaggattggattggagctgttcgggaggacggattatggtcgctgagaaacaagactggatcgaaccccttgtatacactgggttcaaaagactggatcataacttctgggtgtgatatccatgtttgaaactgaggaaagccacggtctgcaaagaccggatatgcttcaatcacaccccgacgattatcatatcgagctatgattagcatccctgtgtgctccgtgtctgcgaaccagatcttgtgctgaggaatgaaccaataggggtgatatgcaagataaagtcggcgaaatgactcaaagggacctgagttctggataggagtaggcagtctctcgttcaccaggctagcccatagtaagtcattcgatgcatgatcgacgagggcccggcaagtggcaccgaggcaacctagatctggagctgagagataagatgcaatctcatgaatgagttcagcgggtaatttctcaaggaacgatggagacagttgctcatcattaagtgaccggtcgttggggccatcgttgctttgttcctgcgacatgaaaacgtcagtacatggccgtccacggtatttccaccagcaagaattagacatacccggctagtacgggtggtaatcgccatctttccttccgaggcttgattcattgaggtttataagagagagatgatccaaagtattgtaaatgacatcactgggaaccccagagtcgcatggagataagaacattggaaaggggatcgaaccagtcacaggaaagactaataagcctaatattgccaatacagtgactggacataagtttttgcacccccgcatactcaccgtcacgatagactcataccgcctacctaaaaggcgtaatatatagatttcatagtatgaagtcatggggttttggccggcaatatattatataatcatgggggtgtggggccaggagtacaaatacttatgtccagccactacggagtatgttatctgaaagctgtgaggcgccaggtcaatcagaaaagaaagagtggaaagcagccttgttataaagctgctaatcactttgtctgtcaacgttgtaagcctcgaacgtctagctcagctagctaacaaaaaatatatgtagcaaacaatctgaagtaaacaattgcaaataataagcgagcaaaacatgaagcgtgtgatagcgatttatagtagatcgtgacaaaaactgcctagctttttaatctcgtatttggagctaggacatttagagcttaactttctctagccgctatcttcttaatggacttccggtgaatagattatcgtatagcatataaaaaataatctatgattcctacagaaaacataaaatcaacttaacttggtgttattgcaaagcgataaggtcggattgaatcgcagctgattttcacagcatttaagaggagagcctaggaaagttaagagtactggtaaatagaacaagaacataggatttcttggcacataaactagggttaattcccctccgtactaatctgcactctagaccccttgaacgcgttggtggctatgtatgtgtagatgccaagaaacaatgttgtcagagtcagccaataacgtctctacagcatagtacgtctctacgccatagttcgtgttcgactgaaagggtcagcgcgaggattgatacggagtatagaggttgagcctcgaggttgagcgatgaataatgcctggttcccacgatattaatagtatacttgtctaccttcacctagccatactgtaaggcgatgctcgtacagttactaatagtaagccatgcttgcctgggcgcccgatacagtacaacagctaccctatccaaacctaccctatactgtgtcccataacggagcatatcacgtgaactaaatatcacctgaccacccaaacaagcgtcttgtttaccattgcccgaacaggaaatatccaggaacgcgcctgggcccctgctgcctaactacaatgtatagagccccactttgtttgtttatttgtgatctataacgaattctctttataagcctatccctgcgtacacttttattttgtaaacgctttctttgttttggccttattattccaatatactctccttatcaacatggatactcggtcaggaaggaaacggaagagttctctctcaaatccaagccagtcaccagtctcacgccgaactaggcagagcttggcagtggcacaagaagataccagtctcaatcaacaacaaaaaaatgtatctgttacacccaagaaatcaagaaagagagtccggttttccgacccaggtcctcggttattacatggtgaagatattgggtcgaccggcttgactccagcgatgcgtcgaacatcgttcgagacagaatctggggatagcacacctagccgcaaatcccgacgcaggtctgccccaacaccgcgctttcagcggtcctatgacccggaggagccgtttgatgaaacatgcaccgagaggaggatccaatttaccccgctacgccaaatcctcgacacacggacccagagaagaattaggcgaatcgggttgagtgatgagatcaatcagattgagcgcgaaaagcgtgagacgcggaacatggaaaagaccatgcgagctttgcttcaagagcgagattctctgaaagatgaactcagggccattaaacaaggtggaatgggcttggaggaccaaagttcggtggctgagtcttattggatgacgccagagacacctagattttgcgatgaagtatcggtagtttccagtcacagtctggatgacgccgctccatctacaaacagtgaagaggagacgttcatattcaatgacagtgctgtcattgtgtccagctcccctgatttccgtggtatcctgcgtcataatccaccggtcactgatagcttgatgctatccgacgaatcacaaacgcagactgaagtcaatacagaagaatctgatattcgctccctgtcccttgatttagaggctgccaggaaggagaggaaaagcttgttcgacgcatgtcgatcacgaatctcagggttcaatgaccctacaatcagtagtcttttccgccagtcatctccaccaccgaacttcttcgagaatatcatggagatcttagaaaatgctctgtctcgtgcgtcagatgctgccgaggctcttgaaggagtcacccaagaatgcaccggcttaggattctccggagacggcgtggacgatgtgatagccgacatgcggaaccacttccgctcagctcgcctcgagcttgagcgtgcgctacctggtgagactgccaacgttagccttgacgacggcaaggcaaccttaggtgcgctggtgaggcgcgttgagtcactggcaaaagatctagggacggagcggcattatcataacggctctctgggccgggaaagggctctcagagggcaatttgacgccttattacaccgatatgagacagctgcaagcaaaattgacagtcttgaggagtcgatcgcatcttctgcaagcgatatgctccacacgcggatgcgaatgcaagaactcgaacgcgaagggcaggaacaggccgttgggattgacagattaagttcagcccttgacaagtacaatcatgaagtgaagggcctcgaaggtcttatcgacaatcttgaaaaggagaacacagctacaaaggaggactacgcccggcagatatctaagctcaaggagcaagtggcccatgaacgttcaaagcgctgttcggcggaggctacggcttctgagtccgagtcccgtattcgagaattagagaaaacagtcgagcacaatcgcattcgcgcttgcgacttgatggctcaggtggagcttttcgaaaaggaacatcaaaaagccatcgagagccttgagcaaaatgccagtgagcgtcaaacacatgaggcagagacagggactctcaatgttcgcatctcagacctcaccacatcattgcatgctgccaagtgtgaactgcagcgtcttcagaatatcaacaccggcctcgaagaacagctccagctagaagtcgaagctcggaatgagctcctagataagtgggccgcagagcaagtgcgatcgttcgcccacatgaaggagaccatcaactcagaacgtcgcaaagccaaagttcgcacggccaattgggaattgaagtcggacgatctcatgtcagatggcactacagtgggcggtgggagtgaaccaatcactccggttagcgcccgatttgttgatatcgaagttggccgtggcaaggataggcgacgtatggatattgtcaggatatcggccgagggactggaggatggcatttcgggtgtcggcagcgatatcggatttgatgttaccgccggtgatttggcttaatttttgtatacgacctcgattatttatttatttacatgtttgttttgggtctcttcaatttctccaatttcttcaactttcttgatttccttcgaatgatatccttcgaattatcttcatcttatcttcatccaagcctgcagatgtcatacataatagccaagtctttccaaggttttggttttgcggggatcgtctatgcccctgtcagggacaacccggagatacgattgttggacggctgatatgtggagcttcaccccctctcttcggagctgatcttatccaaaaagaatggaaccgttacgatgctaagttgcatttaatatatacaacagcaataatctcaacaatctcaacagtctcgagataacaggaagcgaactcctatatatttgcaggctgggaagcccccaaaatattcctcatgcctcctcataccattcaaacttcacgatgagactcaagctttcagccatttccctcattgcaagctgcggctcgctgtgcagtgccacagaccgtgtcctcaagcatggctctcctgaatcagtgggacttcttgccgagcctctcaaggagatgccgctcaacttgagccagtacactgttgctgccaattatggagcattcacctacgatttggttcaccccgtccagccgggaggctccgttgtcgtcggtcacaaggccaccattgtgagctccttcgctttcggccatacgaacatgtatgcagactccaatggcacattgctccctcacgcaaagtggaccccgaaccacatcgacaccatctacgatatggccagtctgactaaagtgttcactgcggtggccgcattgcgcgccattgacgagggcaagctcagcttgtacagaaccgttgcctcctatatccccgagttcgcgaccaatggaaaggaaaacatcactatcctgatgctggtgacccacacaagtggcttccctcctgaccctctgcccggtctgtatgatccatcttacacgaccatgcagcagcgtgtcaatgccgtcctcgagcaagccctccaggatgctcctggatctacctacacctactctgacttgaacttcatgaacctgcgcttcgtgttggagaaggtcaccggtaaaccattcgatgagtatgtcaatgagtacaccagcgagctcggcatgaccagcaccttcttcaacaagggaaacaaccagtccccttcattccattactactcgcgcatggcaccgactgagtaccagatcgaagttctgggagacgacgagcccaagcgtcctcagcccgtgcgtggaaccgtgcacgacgagaatgcctggtctcttaacggtgtgagcggacacgccggtctcttctcgaccgccggtgacgtggcaatcctctgccagatgatcctcaacaacggtacctatggcggcaagcggatcctgaagccggagactgtcgacttgatgttccacaacttcaacaccaaattccctggtgatgagcacagtgtcggcttcgagctcaaccagaactacttctccggacccatggccaatatgcttgctggaggccacactggctttactggtaccacgcttgttgttgatcgcgcatcggacaccttcatggtcatgatggcccaccgtgtgtatcccagccgtacctggtcgagtaacaacattgttcgggaggcggtaggctattgggtcgcccgtgcgcttggtcgggatgttgccttcccttgattttttgtgagatgaaaattatctaagttgactggaacctactgtaaatcacaaagggggaagaggaggaaaacttgtgtatagttaaatcgtgtgtttagaataatatgctcaatgactatttgtcctaaacattaaaatcaaatggtatatctctcggtgcgtaaagcacaataaactcccaaacaaacaaacaaacaaactaagcaaattgcaaagcctactcgctagccatagctttgggctgaggctcaatgtgctgcttgtgcccaggtcgagcaaaaatagccccaaagagattgaaaaagttattacagcgaagtaacatgcaatagaacaaggtgacccccgtaaccataatctcctcttgtgcagctctgtcatctgccttggggccaacaaactcaatcttgccaaggttggtgataccccagacgttggcagtgaattttgccacgggcatctgctgctcatccacacagataaagtcccaggtcttgaacccggtatcactggtccatgtcattgtgactggggtttcagtgtcggagaagttgagtgagcggtgggtgtacaccgtccgccagcgtttctgggctagaaggtgggccttctgtccgcgtagttcgtagtcggcgttgatagagaccgcgttcagcttgccactgccgatgacttcgttctcgggggcttttttgaaaaccatgttggctgtgagactgaatggggaataatggatggtgtataaggggtctgttccggtgttggcgtcggagataatggccttccacttcttccatgtaaagcttactgtaaaagcagcgctcttggagagactctgggtgtcttggggaatattggatgaagacattttgtctgagtcgactggattcttagaagtagaagaggttaggatgggttgatggatatcggttgaagccatagattttgtttaacaaaagttgatgtttgggtttttattgatcttgtctttgatctggaatgaattaatcctttagaggggagatttcgaccatacttatataactcgtctcatctggtgcccagaggcgcagagtcttggcatctccactcatttaggtatatcgcactaacctctttgggtgccatgtaccgctccagccaatcaactttgagcttggggattctccgggggccgtgatgtcattccaacttgagatttgggggccagctgggcaggggctgagtgtctgcatctgcaaagtacaaagtacttagactaacaaatagaaatacttgtgaagatcgtaatgtcccttgtacagcgcaatgttggctgcttcaaacagttctcctcatttggggaagatgcatgctatcttacctagatcaatccacttgaataccttggaacaattagtagacctgactgatagtgttaccaagtattacccatagctcttcggagccagagaaatagctggctattgttatctatgtaggcgtagttgtaatgagaacgcagttatcaatatttacttggttgtctttgagaacgatgacgttgtcgggcgtcaagcatataaaattaacttcattggccacacttcaaataaactttcttcaacagcttgttaaaccgtggaattttcttcgaggaagtcttatcaacacacttgactacgcaccccaaacatggttagccaggacaccaatgcacacaagttccgcttgaaggtaacggcaggcgcagactacgaccgcaagactcatcaattggtacctgtaaatggcgagacaatccgaatcgaaaacgagcatgctattgtgagtctctgcgtacggatcaagaactacacaggtaatacccctactctcatctattcggtcaaagagcggagctcatcggtcaaacaggctatcctgagagttcaccttccacaagcccatactttgacgatcccctgcaccaaaaagacctatattccatatgcttctcaattatcttcaaagagccggtgaacggcaacaacctttacttcggcaatgacttcgatcaccctgtccgcgacttcctacctccgggattcaacacagcactacggattgtcaagtggaccctcgaccctggcctagacggcgatgtctacgctgataagccgtatctgtacagcccggcattggcatcgtgggaccagttccgcattggagataaggtgcggaaatccgacgaggtgccaaagctcgatgatgagattattgaggagggcgcttatagcaaagatgctgccagtgtgcgtcacaaatttaacatccctgatacagtcgagggacgcagaaagtatttccaggacgaggcgaataggaaggagtttgaatttgaacctgggaggatgtatgttgctgatttcggaaatccttatttggcattcgaaggttagtgagatgcagatttgctcttttgattgggatcatcgactcactgatcatattagacttctctgtccgtcttcctggatttgatctacctatcatgaagtacgtggatgagaagaaccatgagctgcggtatacgctcaaggatatttcaaccggacgcgtgtatcttactgtattgttctcggtggtcctacgcggaacggaagacgagcaagaccatagtaagagtgagcaacgtgacgacagtctagggaagtttgactgggagccggagccatcatctggcgatgtcgagtgattttctcgatttagcagggtatgctgtagttgcatgcaagaaaaaacagtaaattcgtctcaagtatcatgcaaactttgaattatatacagatttactttttacagtctcttcaggacatcctccaaaacctgctgagtggtagcctttccacccatatcgggggtcaggaactgagcagcatccaggttaccatcgacagcagcgtagatctgggcagcagccttctcctcgcccaagaactcgagcatcagagcaacactgcggatagtagcaatggggttggagatacccttgccctcaatgtcaggggcactgccgtggcagggctcgccggtgggggannnnnnnnnnnnnnnnnnnnnnnnnnnnnnnnnnnnnnnnnnnnnnnnnnnnnnnnnnnnnnnnnnnnnnnnnnnnnnnnnnnnnnnnnnnnnnnnnnnnnnnnnnnnnnnnnnnnnnnnnnnnnnnnnnnnnnnnnnnnnnnnnnnnnnnnnnnnnnnnagggctcgccgatggcgaagccatcaccaacgttggcactggggacgagacccaagctgccaacaagggcagcagcaccgtcggagaggatgtcaccgtagaggttaggggcgacaatgacatcgtagaactcgggctggcggaagagcttgtagaccatggagtcgacaatctgctcctcaacgaagatggaggagaacttctcggcggcgagagcacggcgcgcggtctcacggaagagaccgtcagtctgcgagagcacgttcgacttgtgggtgatagtgaccatgggctgggcacgggtagaggtggcggcagccgcgcggatgctctggcggcggagtgcaatctcaccggcgatgttggcgatgcggaacgaggcatgctcggaaatacgcttgatagcctcggcaaccttgccgttaggggtatcgatggtgcgctcttccttcacgtacaagtcctcggtattctcgcggacgatgaccaagtcaatgggcttgccgttgctgttgccggcagtagtcttgacagggcggacgttggcatacaggtcgagcttcttgcggagagccacaatgggcgacgagtagccggcgaccttggtgctaggggagctttgggttggtagcaattgtcagccggaattgcgcatgctgaaagaatgatatcgtagcttacctgacagcaccaaagagagcaccgtcacactccttcttcaaggtatcgacagtcttgtcgggcagagcggttccagtcttctggaaggtttcgtatccagcatcgaggtcgacgaagctgaacttgaggttcagggacgcggggagagactcaaggatccgacggccggcctatattccatcaagcaactccagtcagtgaatcgcctcgcatatcagatcttgagtgttacccaccgggatgacctcgcgtccgataccgtctccggggatgagacctataatattccgatcatgtcagtcaattgccgagccacgagatcgcaaaacaagggcgatcgtaccaatgcgaagtgtccgggcagcagccattttgatagacttttttgcagagttgctttcttgaaatcgacaatcgccgtcatcggagcttttgattttgtatacggctcggattattgttgatccgatatactccggagaaccccatacgaagtgctttagagactcggctctctagctcacattcaataaaatgctggcgatggaacaagatcaaaaagtaatgtgtgtctgcttgaatattgagttcaagaggaaatgatgcagtcacctgggaaaccatcccaaggttgcatggatatgcgttcggactacccaaacgggtgacatctcgcgaaattgaatatggacaatatcttcggaggttctttgatggcttcgccgaactttaaactatccattttcatcgtgctgctcaatcttggcaggtattatcaacgctaaacccaaatgggtcacttacgatgtaatgaacatacccctcatcttctccaagcgcccggacaagccgaacagttgatgaagagttcgcgtcaatcgggggtagtgtaagcccaatgacactgtgcaacgaggcatatgcaagcacagaggccaagtcgcgaggtctaaatattagaataatcatgacgttctgcaatgcagaccattcagcgattaaactgaatagaacagatactacacttgatctaagccagaggcaaagagagctgaagaagaaagaaaagaagaggaagttctgggggcagggtcaccttatatgtatcctgagggcggtcggtttatgccactatttacaaatgagacaaacaacgacatatgctcgcttaattaaatatgtaagtggtaacgtgatgatcaagacaatcactgttgatatcaattagatggctggacataccataggcgaggatatctctttgatatgttacttattggcagtgcacaggcacacgatgtgacctaattagtcacttataaattgaaccccactctcagagtaaatattcaaagcagtgcagatggcacttagtttctcagattgtattcgatttcgatcccgtgcttcatcacccaaacttattgtcaactctttcttcgactccaggactcagtatggcattcaatcttatgtcccattcgttggattcgccaatctcaaccgggaaacggaatattgccatcgcagaaattgtcatttattcccttatgcaggcgatactggcaccataacaagaacaagagtattggacgctgtgtgttctattcttggtgaagtatggttggtctgctgtcacagagtaagtggaagacgtcccaactatttcaaaaatatggccattgaacttatttatagttcgcatagcgggctcagccttggttcttgctaactcacacccggagaagctaatgctcattgctgattcaattttgcaaagtacgggcctttcacccctacgagggcttgttattaaagctgttgatatagtgtttacttgtcgtgatggtccctaaaagccctcgtacacccgtcttgtttgaagttagcttggttctattgcgatatttcataagcctggacctcgcttttcttctgggaaaagactgaatatactggcaatatttgtctgagtagtggacaaaatggaccaagttgacccggtttgctctttgctctgtatttcttccgtttcccgagttttatcgccatcatgctagcagtggtgggtattttagcatggatacaacccactcaccttcactcgtttaacactgagcagccattgctccgagcacgccgacaattatgaatcataggttcatattaatccaaagaagccaagagagttggagaagactcatatacaacataggatctggtacccgtcacgtgctcccatcggacatgccccgagatcctctcattcgccaaaaggaaggtggttgcacttctattattggccttttctcttgaactaagatcaatgcattattgtgatgtacatgatcgatctatctttcaacgttaattgggagactgtatttcttggctatgctattataccttcatataagttcaatattcctctaaagccgggtatactgcaacacacctggacatgccttggctaatgtatacctcgacacatggagatactggaactatttcgtgaataggagcaaattaggaaaatagtgcatattctgcctcaggcacactatgccccttactcaagatgaatatccacttgtaaaggtgttcagatatcgtggcatgtttcagacctcacagggggtccctgtctccgtacttcatactccgtacagcaaattaatgtactcagacccccagaggatgaaatcacctgtcacatagaaatgaaagcccctgagacagggagttatgtatggagtaaggcgttggcctattggatgcgctagcctgaactagcgcgtatgtatgtaatagtttttggatcggcccttcttcacaccttgtacctcttgtccttttgtctcataccaattctctatccgactttgacgcgttgaacccgaaccctcctgggaacatgcagtggtatctgcctgtatccgattagtcgtcacaacaatcccgtttcgacctgatttcaggagcacccctgtgctccgcatacgcgttttcagattcccctcgatttgcatacccgcccttgttcgactgacgtacgctcaataatgtccgataacaatccccatcaccctggcgtgcgcagcttgttagccaagtttgaaggtcaaagccccatcgcctccccgcctctccgtggccgatccccaacttcctcagactcgtcagcaacagttcggcagctgtccaaggtccgggctagctttatcactgtggagggggtcattcagtcgaatccttcttcgccgttgaggaaaacaaatgcgcgcagcgacagtcctggaatgtttggaccgaaaatcaactcggcggatgcggagtcgggacagcagggcatgatctcccccaccgcactcagtcgcctgaaccacacagagaacgcgactctggaacagataatggctgagagtcgaccggcggagtctattgaaaccaagcgtgaacggaatcggactgccaaggaggaacccgcggcgcgcaccgagactgaagttcggtcgcgaaccagcccgcgaaagcagacaggggggtcaacctccgcaggttccaagtcaccaagctccgatactccgtcgcaaaagtcagattcatcagtagtgattaagaggaagccttcttccgttgggtctgcccgcaatgcagccagaaagtccgtgtcaactactgcagcttcaactggtgcgaaggctgcttctcaccatgcaagccccaagcccacagctcgggaagtggctaaagagcgcgccaactctctcgcccacaagcccagtcgtgtctcactgaatcccaagccaacaacagcacggtcaacccgcggctcagcaccggcacaagatacttcaaagcctcatgccgcaggtgtatccagcaagccagtatccaaatccccatcgaaacctgcgcgtgtacccggctcgatgaatacgtcaacacgcgcgtccaccgctaagccaggaagcacagcggctccgagcgctcgcactactaccagtgcatcaaccctcacaagaaaaccttcaactctcaaaggcgcagctaaggttcagtcgcgtgccactactcctagtgccagcgttcacagacaaacttctcgcccttcgttgtccgctcaagcagctagtgatacaagccccaaacatgtcaatgagggtttccttgcgagaatgatgcggcctactgctagctctgcgaacaagacccatccccaggaaaagaccgatgcaaagcctatcgccaggacaacctctgtttccaggtcccccaaggcgtcgtctgggagggtgccagatcgtggcgtccaccaagtgaagcctaagaccaccgcccttcgatctcagagtcagaaatcccaggctctgaacaaggagactgcgccaccgaaagatggacagaaaccttctcaaaagaaacaggagattgagaaagagaacattgtggaacctgaaaccgtgaacctcgctgcgattgcggctgtggagactgcttcccctgctcaggttgaggagacagtgaccgagagttcctctcccatcccagttgaaaatgctactgaggtgccggccgaggtcgatgctcccgttgaggcccatattgagcccatcgctgaggatgctgaggaggataaggctgctgaaaccaccactacaaccgaagagattgcagcagagcccgtggcaatcccaacggctgaggatcaagtgaagatcggcgagaagcaagaatccatgatttccgagccagagctccaaatcgaggctcccgaaaaagaagatgatgcgccagtgaaggaatttactgtccctgaagctttaacggaggtcgccgagctcaagtccactgatgagcctgcaactgaggctgaatcgagcaatgtcgccatcgatattgccaatctggcattgaactagacgctctgaatccgaactgcactgcgttcatctcaaatggatttcgctggtccatctccgcttctggtaaagtcttggaataaccttttaatcttctccgataatactcctccccattgtcttctatctcaccaagcgtgagcccctttccattcgtcgaggcttgccctcaaccttttcaccatctattcttccctgtctatctcttactctatgctagcattttcacatctatcagtgttttgggttgtcttgttatcgtttgtttatctcttgcatactctgtaccaatttcttgagcatattattcttagcgcttaggggcattatccaatttagcatcttgatttatcaatctagcggggctcaaagctttcatactaccattttgacggttcttatttagtcgcttcattttctcatcaaattgagaagctagatgatattcccacagtactgctcaacagctggcctagtaataacaagcactcaattgaccttgaccagcagagatctcttgaaaaataaagatgcagattctcaaactcccaattaaataaaaggctcaaagcttcctctcaagtttcttcaggaacctattcacaccaccttccaaccgctctgccctgtcctccaatttcctcggccgctgtccaggattcttcatggccttctgtgcatatttctgatagtgagagttagcctccacttcagtgggtctgtataattggttatggatatcatattcggagccgaaacgctggtgttgttgttgttgctgctgctgctgcgcctgagtctggtcataggaatgatgcgagaacccgcctatcggcaccgtcggtccagcctgatattgaggcggcgactgggcttgggcagccccatagacgtgttggtcatagagatgggcattcgggtcctgcggcggcggagcgaaggacatggaaccttggcggctggaactgtactgttgagctccctgtccgccaatgaacgacggcgagtatgaaggcacaggcattcccgggctggagctggcggtggagaaagagtttgaatgctgtcccacactgggcggaggtgaggcgaatgatggagggcctgcgtattgcaaccccggggttgaggggggcggggacgcgaatccgcccacgactcctgcgccccccatcatttggtgcgggggcgtatatggcatgccgctgtcggctgccactgcggctgcgaggccggtgccgctcatcccgtcctctggcggcggggtcttctcgcggtgttggattggctctggggcagctggggcggctggattgtatgggagcggggcaaagctagctggttctttcctttcctccgcgggagtagaaccagcgcttagttgttgatcaactggaggtccgcttggaggaggtgggggaaagctgatggtctgtgggagggcttgtgtcactgatgccgctgtgcttgtaggctcggatcgtgagttgcgtgtttgaccattctggtaggcagggtcggagactgcaacggtttcaagttgctggactacagagctcatagtttgctgtggcagcggttctggctctcggtctgtctcgacctggtcactggatagaagccggatgacagtgtccagaaagtcggttgaatcttcttcggtccagaagtagatatccaatgtatgtaggcgagggaaatcgcggacatctttgggcttatcgcgtgggtctccactaggcagacgccactcatgttgaagggtatcttgtccatattgctgttggggcaagggggtgtgagtatcaaccgttaatgtacaaagtgtcgggaattgagcagaatgtcgtatatgaacattgttcaagcccccacagaatgcatcctgttctggagatccaggattattggcaatttcaacccgggacttgttctgagaagcatcatggtaaatataaacataggagcctttatcaaaacggtggtgatatggtgaaggtcttcgggttggctcagtgaaatagtagtggatatccgcaaaactatctccgccgttagacacaatccgagaactgcttcatatcgatctgcggggaagtcagttcaactcacacagtcacaaggcgctcttcgcccgccgatggtggcatgtctgacaattcaaagtatggaatgcaagtatacaacgagagcagcaagtagttgggggaaaagaaaaagagggacttacctttattatttataccttggactgaggggtactcaacctgtgaaacgccagcatcaaccgccatgcaagttgggcgcttagaagatgagtgtgatgtgatgtgataggacggtacttgtacttggctatcacatctatccgctgtgggcgagaaagtaccggtacctggacaagaccgcgacccggaagtaccttttatccgaaaatttccatcccaaatcatcgcatcttcaatcggcgctacaaccacctcctgccgtgtctttgcttccccagacaattgcagtccattgtggtccttttcggtcttccctttcgtgttatctgggatctccgttcttcttctcttccgaaattgttcaattccaccactctctttcctctccgaacggccgccggtagagcttaattgctgccgtcgcgaaatcaagatgtcgctcgtcaacctttctgctgtctgctcccacctgaacaatgctaccaaggcccgtctcgccctcacctctatccccaacagcaacctccacctgaagctctccctcgccctccaaaactccggctacatctcctcggtagcccgcggaggcccgactcctcctccagcccatggcatcctcggtttccctgcagtcaacgatgaggtcgaaggcattgagactataacgcgtgataatgtcgcatcaaggcggctgtggctaggcctgaagtactggcaaaacgagtcagtcctgggcaagatacagatggtcagcaagcccacccgacgggtgaacattgatgtggagggactgcgccgagttgtgcgtggtgagcaatccgggtttgtggccggacttcgctcgccgggtgagagtctgtacctctctacagaccgagggattctagaagctcgcgagtgtgttgagaaaaagcttggtgggctggttttgtgccgtgtgctataagtttgtgattgtcctagtggctaatctctgatttgggggagctacccaccggggagatttgtttctcttcttgcatttactttggagtttgttggttagtcgcagcgctttctcttttcgagattagtctttttgtgactgttgggataatacctgggtcaaggatctgtatattagatgtctgcgtatctcgcattctgtgtgctctgctggtgattttgcagctgtcctcaatgtgacacagtgtatagattatgacttgaaatatgtccgtactccccatggatgtgcttactacaatagagtcgtaatccttctcaggctgattttacagttatactcatgttcccaatatcccaggaatgatatagtgtattaaaggccatgaccaaatcataggcaagaatagaccgccacttgtgcggtctctgttcttcacaatgtaattcaataatcaagtcttatggcaaaagcatccaaagtatgaatatcgacttcactttctattgaatcctgttagaattccgggtctctcgcaagtgtttcgagtctaccggagctttttttttcggcctacaaacactcccaatggtgatccgtccgtctcttgggtaatttacgttcttcgacaattttcatcctttatctcatctcatcttggtcttgtcctctcatgaaggctttgtccccctgacttcagtgatcgggcaaagaactatcaaccatggctaaaccccaaagtgttaaacgcgcgcgatccaatactattggcgatgcccacaacacaacaacgccatcatgggaagaaatctcccagcgcgtccagactctcgacgaacagagtatcgccaatattctcgtatacgcagcgcaaatccatcctgatatcatgaacatggtggaccacgccattcatgtaacccgggagagagagagaaataccatcatcaacttcgacgaggattcgagataagtctggcaactgattaaaatcacacatcgctacgagcgcagttcaaagcagtacgaaatagcgggcgatgtcgttgaggaagtcgtcgataccattgaatcaattgcggaagagtgtggaccttctgtaaacccacagacacgattcaatggactctccgtactgcgcaaaattggcaagacgattgcgctttctaccaattatacactaggccgtgaggtgcaggaatcgttccaatctgatagctctcttgtggatgcgatgataaaaatcatcaattctatgacagcggatgaagtccgagcgatcagagaggataactcaagtccaacagcattgtggccaaaattacaggaattggaaaagctggccgagaccgaatgcattcatcctggactagaagaagtgttggatctattgtatccgatttgaggatgaagaagaaatggatgaagaggaagaggaaggagaagacgaggacgatgataggaaggagttggacacagaggagggtgatgtctatcaagtgccatgagaggcatctttggaattgacctagatcattgttcaggcatcaagaatatcagaacggactttaaatatgaaagaactaaacacaaatctccgaccatttcagttgcttctctagcatcatgtccaatatcatttgaggtgttcttaaggtgatacggtactgttttatgtcgtatgtagttgtgatgtcgcacagttttggcaatccaaatttcgagtttcccccacaccaaagcctctcaaagcttctcatattctcatcctcaacttccaaaatgactgacacagcgaggaaagtcctgatatctggtggcacgggttttgtaggctcggccgtggtacgggctcttgcagaaaaatacccaaactttatcatcgccgtcatcgaccaaaaccctccacgagccgagcacgtcctgccagaaataactacgtggattcaggtggatattacttcaactgaaacattgagcaaagcatttgaggctgtgaagccagatatcgttatccacactgctggagtcgtcccagatctggccgaacggtttggtcgccgactagaacaggaggtatggaagatcaactttgaaggcacacggaatattctggatatatccaagcacagcggggttgaagtattcatatacacgagcagttgctgtgtggtgatcgacgatacgcgtaccgctcatcctaacatcaatgaagaatggccctcggcatttaggtcaaccatttatggagagtccaaggttggaactaccaatcccatcagcaagattcacggcatcgatatgagatatataactaacacgatttgggatggtcactaggctgctgcagaagcactcgttctaaatgcctcaagcagtaaaatggtgacatgtgccctccggccatcggtactatgcggaccaggagactaccagctattaccagctattcacgcatgtatcgccaaatacgaaaccccttttttgatcggagatggcttcaacctatgggatatcacccatgtcgacaatgccgccgatgctcatatcctagccatagagaatctgctatcatctcgcacggctgcaggcgaggcatttttcattcagaataacgaacctatcgcctttcgtgatttttgtctggcaatttgggcgcattttgggcatgtccctccttttcaaatgcatatccctaagagtctggcttacttcaccgggttggtgtgtgagactgtcacctggttgacgggaacaacgacaactttgagccgtggaagtgtacaagatgcatgcgccattcgatatgccagtggcaacaaagccaaggagattctggggtacgaggcgcgcataggtatcgaggaagccatccgtttgagttgcgaggtaagtaaacaccaagcgtaaccttttctattgccgtactcaccaaagcaatttaggattatgcttctcgtctcgggttcgaattgcctcctcaatagtaaaaatcgaaaaaaaaaacagtaacgtccatgttgatggataatcacatatagtttccggatcaccggcaaatgactagggttaaggacatcctgaaaatacttcgctcattatgattttctggggcttgagaggcgttccttggcttgaatgatctcatcatatctccttttgccgtccagggttttgttgataacaaattctagacattctcgaccttggaagatggacattgatacgaaggatgaggttatcactattgggatcagatctgttgcgacgtcgacagattagaaatgactaggggcatcactgtacccaagcttaacttgtcttcattgaaggtgcctcaacctgcacggtcagcggaaatgatttgtgggacgcgtatcagaatattcgcgatatcgggggctgcaagaagtgcggctcgtttgagaggagtgacggatgtacacttaagattgactatgtttatggatgtgatcaccatacttctaagatggcggttatgaatctcatggaggcaccgaactctactcagagtgtgtctatcgatcagcttggacctggggtggtgtatgggagctagtttgagagttttttcagtattttattgagatgaaaagtaatatgattcatagactgaacctcagacgaatagatcttgctgtgaaactgttctactattaaccctgttcgaccacgatgctattactaattgattcagctctctgaagcacatgagaccatcactaatgtatatttttatgattctctcccccgtcatctgaatcactatctcccaggaatcccaccgggcgtaactgcaattcctacgaagagaataccgaacaaaaattcaaagtatgatctcagttgtttttggctcactagctgttgggaaaatgagatttagtatattttatgtagaagtagccacccaataacgtactcagcatttcaggctcatcatgtcgtatcctggtagcagcgcgtgacgattaaaacaaaagcataatatatttgctgcttcatctcttcatccaacaaaaaataagggttgttgagtgcgatgtggcgttttctctttgttttcaccaacctggaacctaccgacactcgtcgcggactcgtctgggcgtcttgttgggctgcaagggtagatcgcatgccatcggaacagctgagctctccacaattggaaaatccggtatctaacttcgtctctgtttcacccggatcttcagaagagtccccagaagggcgagagacatggcccatgcggcttattgcattgggcctcaaaaagcccgagtgcccaacccagattaactgcgcgcgtcaggatttccatttgctacctcgagtcatattttcatttcttccaggaccttcgcgggtgcagatcgcctctatctgcacatttgggtatccataggtcgatgtccaattccagaacccctgtccttgcatttcctacccaacatcagctttgctgcccgaggcattgccccaatacaattctcgaacagatgttggtgcggcacccggcagatactagtgcttctcccttgatccatgaagatcgagactttcgatggaatgtttaccgtccgcattcatgtcatgcacccacagaggcgtctcacggcggctgccaacgagctttacacaccggtcttattcttaatcgatcgagatcttcaaatgtacacagtacggatagttcatgtgttacgcaattgggtttcttgaaatcgacaatgtgcaggcaacacaggcctcatctccatattttgtctccactaacgccactggcgtaaagtcctctagcgcggctctgaatccagttatactgccgttgcatacatccgggtgggctctgatcccctttgtcaggcacacttatcgatttgtccaacccgggaaaagtgcctctaaaaaaaaaaggaactataatatacctcccctttgctcgttggtgaattcatcgagaactctctcgatagatattttcttttcctcgctactcttctgaatcttattctcacttgttatattaggctgtggtactactacggtcttacttccttcatgcttcctgtccttcctcatccattggcggctggaccaggctatccattctcagcaagtctcggttcttgtgcaagctctatcaactctaaatttgatactcggtctctccataggttagcagaatcagcatcgcttctcgatttccgtgccaaaactctttggaatccgaaactcatactccgtagcagcaccatggctcagcaccctatgtatggaaacccagcaaccaccccgctggtctatcaacaaaggtattgtttggccgtcgttcattccattgcaaattcctcccaggctgtcatcgacaagaactgatttcgttccttttgctaagcggcgaaaggtcaccatctactccccacgggtatggctacagagacgaccgtcaagtgcctttcggtccaatggattctaaccgtcaggcccattaccatggaggcccagtccttccggatggccacaacctcatgatgagcccacctgcggcacgtttatcctaccccccagctggaccggtccacgtacaacccaggactcatgaatggagccacccaaaccagatgcctcgggaatccccgaggcgggaccttggaacaatgagcgccccggaaaccccggagtatatcatggaaagaaacagccagcggaccggcgagagatccagaggaagcccacactatcattcccagagacggacatccaaccgggatgaatttgatggcccgcatcagttcctggagccgccttctccacaggctgtcgcagcccaggataaagagctgccccagctccctactaacctcgatgccggcgagcaagacagcatcctccacaaggtcaacgaccgcctgtcccagtgtgcctatgacttcatcgcaaaataccagttccgtgttcccatcgagcaggacaagagacccgtcaaggtcccctcggaccgcgagtggaccgagtgggtatacctcttgaagcggctggctaccacacgccgcatccccgctcatctcttgtacaaccgccaaattaagcagctcatcactgtcctggagaactccctggagatgcgccatgctgccaagcaccagtctaggccagtcaaggacgaccgcaacgtgctgcagctcatttcggcggggactcaggtcgcgaaaatccttagggattctagcgccatgcagtatctcgatagtctttatgtggacaccgagaaattgatcctagaccgacgcggccgtcgtgtaagattcgcaaacacttgaatccactggaaaatggccgtttttaaaccctccgcttggattccactgttcactttttgttgtcttcccgtggaagcccattggattgtccttttcttttctctgctttccttttttccaagtccaatttcggaatactccactgtcaagttttgaacccccttggaggggaagtcttggtgatttcctatcaggacaaaaagagcccaagcagctacccagctcagacgaaggaaggattgaaactcaaccccttcaggctggaaaacgatcgaccagatcgccgcatgtcagaatgtttacatctgccccggaattatgtgacagccagtacaaatgagatcagtaatagggtggctttgtttgttttttcagtttggttcctactttcattccggcgtttgggttggttgtcttgatatgtttttatacttcatgcttcatgcttcatatgtttcccttatgccacacgactatgccgtacgactatgtcatgatttgggggtttttttgttgtacgcagtacgagattatgtttgtgatttacgttgtctacaatttgattcgcttgggtggtccagttctgtttttccctctgctaatattccatacgttccaggttttgggctgcattgttcctccacaagtatagtctcatggctctactgggctgtatgtactacagcttcacccaattgactcggacttttgaagaaagggccaaaaagaaaagacaaaaaatagtttccctgggaatcgaacccagaacctttccggaacacttgcgaatcgcatttgttaacggaaaatcataaccgctagaccaggaaactgctcggccacttgggccaattgatgaatggacaggccattattggcctcatgagtctacaactttgttcccaattatttaggtccggagtaacagaacgaacttgtttcgccaaccttccaacattcgaaagtgggcaatactcaatccacagcggcgagactctcaatggttcttaatacaacggagtattctgctctgcataggaaccatctagacccaatatgaatcgaggatacattttcacttatgaataccgtatgctgccgagcgcatattcgaagctcaaaactacagtaacctgaagcttaggagtatttaccaggtcttgaaactacagtctaccccttgtggcttagatatatgtggctgaacccgggtaaccctatgtcaatacctagtcggccattgcctatttaggtaacaaaaaaatgactacggagtatgccattcgctatattccgcgtatctatggcttatcaaggaatgtcagtcacagccatctttggctttatgaactagattgagtgatataatacaaattattcaacataaaataatcactcgccccttcgagctgttttgtgttgtcttattggcttattgcttcctaccgctcgcgggtacagtgattttctgcctggcaatattgatcaatagtattaagtcacccatggcggctgccgtacctaacttaacttgtagacaagccctgaaagttagaatgtcaaccttcccccatactcaacctctctactacagaccagatattactaggactacggccttttccaaaattttcaaataccactgcatacagatatcgaatgtaccatgttctacttatgaacacgctactaattaggctttgcgtcgtagtgtcgtgtaggtttcttgtggtgccatgagtatgattctaatataataaccttgctgatctttttttatcagaacggcattatgaattgtacaagtaattattatctagggatgacataatatagccacaggagccttggtagctgtatataaacaatatatgtcatgttacgttttccatggatgagaaatgagcttttgatgggacgtattaattgcaaataaatttgtgagatccagtatctaaattaaattcgtgtgtgaaagcgaccgttacggaccatgcctcactagttattgtcagtctgctgcacagagtcaggctcagcagggtagacttggtcaagaatgccacatgggcgcttgaggttctctagccaatgcccttgctgcttcgccagagcatctgccactgctaactcgtggtttgcgtgagcctgcctgttatactgtttagccctctcattcggggttacgtcactgacccagggccctaggtagttagctcccgatgccccatataggtaataaccttagaaaggaagttctgacaaatctcccccaacatcatcccgaggtccatcctgcctagaacttccactggacactttgcgtacccgttccttcttctattttgtctggtcgatcaactttcgcgtgttgcattttcaaaatggcctctcagccgggactcacgaatatggaagccacgatgggctctcgtaaacccacgtcgactcgccccaaactcgatgaaaccctacctacttctcattcccctcaacgcaccgacagcccatcaaccagacttgaaggcaccaaagtgtcgcctgtcaagcttctcactacctcccgagcaggcatgccattccataaaacagcgcccacccttcaatatacaaaccgtcgccgcgacgctgcttctgactcgagctctgactcggggcattttttcaagaccatcaccacacactcaacggttccgtcggagctctattcacgcgatcttgatcactcctactgcgttgatctcgacgacttttctgttccactagacgcgagagtcctcagtgctccatcgttccgacagcttcaagccgcactaagccaggtaagatcaactttccagccccaatcccccgtcgtcccagttcctatatctgcaagacaccggaaaaaaactattctccaaaattaaagaagacgaagagctctttcccggtatacgactgaaaatctcatatcttcgccacgaagtactgtttaaaataatacccggccatcagcacgattcaatcattggcggtttctctcaagccctattgatccagctattcataataggcctttcctatgacaatggggcgttcgtatcccgcccatcgccaagaacccaaggaatgtctgtggctaaggagcctgactggtggctctccccagccgatatctttgatgggtgggggggcgggattccctaccctagcccttgaagtcggcgtatcagaatcctactcccagctatgcaaggacgcccagtggtggtatagcaacttcactactactcgcaaacctacatggtgagtagacgtggaggtatggtccgaaggaccttccccaaatccgtataagacccggagtcacattaatacccctttccgaccaacgtagagagttacgtaccaagatgggcaaatccatggtacacctttggtgctcaacttcgaaagtatcttccgcagaccccgaaatcaacacgaaggggatattatcatcggcatgcagtccttagaagctatgtgccaacaagttctttcttaactatctatcccttgatagcgtggctgttgttgctccctgtgtatggagcatcattcttctggttcgagagaaagaaaaatccaacctacctttaacgcctggcagctggccgaagcccttggcgcatcacgacgtttggcggaaagcatctgggtcggtgttgggcaagcggtgattaatggcggtgagctattatccaatgagagagttatgttccgatggcacatttagtcgccccgtactaggtgccgcagcaccggacaatagcaccaaaatcccccgagtgctgcagcacttgtcaaggcctactttgatttcgctattgctatttaggggagacctacggtatatataccaatttttgaaacattggccctatctttttcttttatttagcggcattataccctcgacatttgcattcatgtaacagttgcccgcaactcgacatggaagttttggcacatgggtcatgtttatcttttagattaattcattcatgtccaagtactgcattgttcaaagattataggacgccctggggcggccgacaatcttataactaactagatggccattccaaggtttaaggttcgatgctaatatagtacgagtaattaagaagaggatatatttgaagagtatgaggcatctattcatctatatatttaggacatgaatatcgacatgagattacattcgaagcaacaatcaccaggattgtttctttgccaaatcctgatttgacaacgaaaatgcatattagttcttcccctcggaatcgattaccactctctgagcctccagactactgttgtctgtttgttcctcttcctccgcctcgagctcgtcgacattccaattgccaaacaccgccataagcgtgaaggggactgtagcaccccatagtgcaaatcccagcgccatctggttgatgttggcccagtgggttgtgccgaccgcgtaggcaatcgtgctgccgatggactcccatgatctcaggatgccggttgttcgggcgatatcgccatctctctgcgctcccttgatctcggccatcaaccaataaatgtatgtctgcaacatctcatagaagaaccggaaaaagatatagacggtgaaggccgagttgaagaaggggccatcacccaagtcgaaggcagggggatcggtcatgcgggagagtttcgactcgacgatggcgttccatgtccaagacgctgtgacaaacacagcaacgaatatgtatacaacttgggatctggttcttcgtgacagaaactttgtatcgaggaataagcccgtcactatgttggcgctggcgccgaccacggctgtgaggaaagatgcaagggctctggagcggacggtgaagtaagctaggttttctgtcagcgatgccatttatcatcaagaaaggaggactggagatgtcatactcgtcaaatagtttccctggtaagttgcaccaaactgtccagcgaggaacaccgggatgagtagcagcatgtacttattcgaaagctgcttccagatagcgcgagcctcgatagacatgttcgttttcttcatgtatgggatcttggtgccattctttctgataacgtcttgtggctgagacaacagcaacgcaaatggagcgccgagagatgagatggcaacaaggcccaagtatgttgtgtaggtgaccttgccgacatgcgaagtcttgacattgagagcgagagaaatggcaccgccaacaagcggtcccatctggcggatagacatccagattgccacgtagctaacataaaaaggtcagtcggatacacaactgcatggtccgggagtctcgacttaccgtcctcttttctcctcctctggataaccgactgcaatggcagcctcactagcccatagaagagacgctccaattccacaaagagcggccgcgagcaagagaaaccactcattgccataacgattgttgcagtacagaccagccgcatagggtgtgtagaatgcggctccgatgaacaaggtccatttcgcagtgatcttgttgctgacaccgccagcaaggaaacagccaacggacatgagtccgtatgtcagggcattggcggcattgttcaggtaaggctgcacaatgatatgttagcggtagttgagcagattgtcaacactccgatgacttactttggcatttcctccagctccaagattattgagagcagtccagataccgggttcgcagaaggccactaatcccacgatgacaatctggaatagacatgaccggtaaaagcgggtcacacgttcgagaatcatgatggatgtgagaggtatgcaatccggaaatataccggagacagccactattagtactacatggcgatggggagccaagatcacagaattattttgaacgaaaagaaaacagcacgtcagaacccattataatcgcgatatcttggttttatctctcgccggtagagccccacagctactaggaggataactggtgctcagttgtatactggagacacttgaagaactctgaattagtgtcgaatcggtaatgggaaatacggagtcgtgggagataatcgtcgatatcccgaggttcggaatggtgcaaagtgagccattcgtctccaaaagcacgtaatattggggggcgtgtcgacagggccgggccacaacagacagacttacgagttattttctcttgttgtttgatatgtaccttgtttgaaatatgttgtagtatcttggcaggatgaggtattggaaactccgttataggactttataagagatgttataggctataaaatgtcttggccagtagatcttggggcccgccgacttctctcctatttccttcgaaggactccgtagtcgttaggaattccaaggttaaattagaagcctagaaaatcagacgtttgttttttttttatagttctgttgtagccaaattgccattgtactaacaaatctgcttcaaatcccaagtaccgctaaattacaataatgtacacctaggttaatctaggaatccgagataatcaaaagctagccatctcaatccaactggccacaaatgcgagtcggcgccctcgatcagcagccatacggcgcgagaactcttcaaagttaagtctcgcaccgtgaccacgttccttgttttcacgttccacctggtctaaatagacccaccgagctagggtccggggcgaaggtcggcgtggggcagtgtcacgaggcaggtcattgacccgatgaggaggtgggagtggttgcataggagaaggaggaagcttgggggctgtggcttcggcttctggggaggagcggggagaagatggggcgggaagagagatggtcccgggctggagtcggaaccgatcagggagatcagggtttgtgttcctaattggtgattcctccaagtcggagtctgattcagcaatcacttcctgggtcatcacgaatggctcgtcgggacgatgctgtgggagagttggatcgcagtggagtctttcctcttcaacaaccgggctggatggccccacaccagacgcagaggcagcgatatcatcgccataatcagacgaagtggcggacgttgtggcggattccacaaatggccgtgcttgcccaaatccagtatctcttccgggatcggcgagatgagttggtcgcacgtcgtcatcgtcttcatactcatcctcatcaccctcatctgaaacggtgggccccggcgacggagctagcactggtccggtattctcaggtaccaggactgggctccgaatctggtaaccagcgcgctgtaatagatcatcaagtggctgactgttgataatttcctcgagttcctcctccactgggggattctcagttgtggtgcgtttcgaggggtcctcttttgctgcgagttcaatctcgcgggcccacaacttgcgatcagctctcgtgcgatagacctccatcataaggtcctctttcggcttgaatagaatatctagaagctcgttgaatccctgttgcgtgacttgatataggatttctttcccaacgtccctttcgacctctgggatttcaaagccaccccatcgctcgccaacaggaatactccgggacgaggtggatgggttagatcgaatgtcgtactcatcgtcgttgagatcatcctggaatcgcaccttggacgaggaccgcgaacggaaagagggtgggcgcgataccgattcattaaggtcttcatcatcgctgaagtcatcaatggccggatccctttcataccctgcagggatagtggcgccatcttcttcgtctgtatagaaggcgcggcgcctccaacgttcgtcaattccacgctgacgagcgtcaaacacacgtctctgatcatcttcgcgcattctgtgataaacagcatccgcgacgcgagcccgatcaattggatccgtgatttcccgagcgggaatataggtcccgagagcagaaataatatcttcttcgaggatgtgttcaactgggggccaggtaccactggccaccgacgagctagattggtctgatccactctcgctagcaccatcctcatcttcttcttcgtcgtcttcattttggtcactctctatggcatctggcgggcgaggagtagtctcggcgggtgctaggcgtagtgtagatgggaacaatggcctcattcgactaaattgtgctctgacagcagcatcacccacgaccaaatgccgatcaccagtatcatctccgtcctgtcgcaagattccttcgttgtcaatgatttccatgtccccctcggaattcatgctcttgccttctcctgtgcgagaacgttcacctgaagggatgctaccagggaatgcagagctgataggctggctaccaagtaccacatcacgggctccaccctctaggaagtcatcctccatgccagcaaccatgtcccttgtaagctctcggctcagcgcatagtatgccctgaaaacccgaaggaagtccttgcgttcgacaaagccatctccatcgatgtcgtagccgcggaacacccgtcgcagccgttcgtcgttgcttttgttgttgagactggccaagcccttcaggaattcctcgaacccgataagattgtcgccattggtgtcatagaatgcgaacattcggtcgtaaatgagactcgggggcggcggccggatagaagtattaggcacaaagcatcggtcgaatgttttgcgatcgatggccatatgcaacttgtttgggtcatttgcccactcataattggccaaacagcggaactgatcccagagtgcatcaagctccgtattttcgaaattgcagtctttcataagacgcttggcaagagggcgtggaagactgcgcgggagcattgaaggcttcccgggataccatacaggctgggattgacgagggtttcctaagaatggggctggaatccgcactttgtagaacaaatgtgttttgatatggacctgcattgcctcgcacgtctcacagagatcgtagtcgatgcaattggcacatcggtatctgataccctgaatcggcatggcaccacagctgttgcaagtaaccccacgatggatatagccgtccctccgcgcctgatcctcggcaatatgataaagcaggttaagcaggttttgaccttccctattagaaggatcgttgtttccatcacgccatgagaagacgctctggtcgtccaccaccgtctcaccgccgtcaatattctgtggaggggcagacacgtctggaaaagtggaggttgagagagtgacacgttcaccgttctgtcgtcgccgacgcagctcttcgccgtagttcgtatctccgttgaaccggaccagagccctttcaataccagctcgggagatacctcggcgttgaagttgttctgtcaggtatgttctttctgcggtatcctctgggagaatatgtgcagacgggaaatcgagtgcaaggaaggattcaagaaatgtatcctccatcatctcgcgcatgcgctctgcatgagcaggcgggacgcccacttcttccattagctggtcgcgtgttgcgaggagtgatggaagaagaccgctctccacgcgacgcccatcctccgtctcgatgcgaaatgtcccatatacaccattctgatgctctagctgttcaaggtgggtaatagctcgataagacggagtatcagcgatcccaggttcttcggcttcggttggtctcgtccggcgcacagcatttcgacgtcggagtgaacttgatgatggctgcgagatgacattgttgtgaacatagagaatcgcataggcagcagcgacaccagtgaagaggtagaggataggtcgatatcgtgctagtgagactggccctgggcgcgagtcggacatgacggaggtttggtggaatttgagctagcggaagctgcaaaaaaacatcaggaacacaaggtgtagcgcattctgatcacagctggataagcagatcaagtcagacccgcaaagtgtcaatcaagacactcaaattagaaaggatatgacagtcaatttggagatggcatttccaaggttgaaacgtcaactcgctggttgctgactggagcccggccgctctgattagtaagctatacttgagctccagggctgcccagcagagccctacaacatcatacctacgatgtacgagaagccaaattttttgaaaaaaatgggagatgatatattagctgctctatatattggaagcctatgctcttttcttgatagaattttgaaatagataccaaacttcttttatatctaatatgtcctcggtagcttctgtggtatatatatgcgataaacattgacaattttcaagccaatcccaattctagatagaccatgcactatagtaatttgcttgcaagttttttgcttttgaaagaacacaaatctaaaactttttgaagtatagcttcacctgtgaattagcggttgagtttgctttcacggatgaaacagctgcttaacaaagcgaagaacacgacaaaaaccaaaaaggcgaatcccttgttggtggaccagccatacgagtcccggacaatcctggcagttgctgggtcgagcgttttgataaagtccagactttctcgcactccttcgacaatttgatcaatgttcttactgtcacgtagacctgattgcaatcgattccgtaagacttgctgaacgacagttgatgataaagagagaccaatcacggatcccaatgagcggaatacatatgagcaagcagtgacgaccgcctgatcttcatatgtagcattcgatactggcggattggttagcatatattgaaggattgcagagcaagatcagataaaaactcactcaaaccgatcaaagttgtagtgacaccaatgccattgccgaatgccgaaatcaccatcccgcagatcatcgggactgtactagccaccacaccaccggagaacaggtatatacagaacacaccagttgtcagggaagcatacgcagcaattgtcagccagtaatacttgccagaccatttcatcaacaagcccgcaaacacggacccagtgacaccagctagaatgcttggcagtaagcgcagtcccgcagtcgtggcagagacatcatctactgcttggaagtataatggaatatagaacagggcggcaatccatcccccgaagctgaagaagttgcagctgtagcaagcaaagaatgttcggttgaagatgatgtgaccaggcgcaaagggttcggctgctaggtagatctcaactaagataaagaccacgaacaagacagcagagacagctagcgaggcaattgtcaggggtaatctccatgacacattactgccacgatcaagaccaactaggaaaccaagaacagcgccaacaaggactacggcgccaaggaagtcgatgcgacgcagcttggtcttccaatgggcgctatcgcgaggaggcagcttgagcaggaaagacacggcaatgaaagcaataatgcagagggggaattgcgctagaaacgccctaagtaaaaaaacgtcagatggcgcaaggaaatgtgggtctcgcatcattcataccagcgccagccaatgtagtcggagagaattccacccaagggtgcaccggtaccggcacctgtggcatagatgatattgataataccctgccataggcctcgatcgcgaagaggaacaatatcactcatcaaaatgcttacgacggtggtcataccaccaccaccaatgccttggaagacctgttcgaaatagtcagcattacatgattcagacctgagatcatatgtgaacatacacgagcagcgatcaactcattaatatcccgagctaaaccgcagcccaagcatccaaggccgaaaaccgcatatgcaaagaggaggcacggcttgcgaccaaatatgtcgcttagcttgccatatagaggttggaatgatgttaaagtgagaaagtaagaagtagcaatccaactggtcaggttgagagctttcaagtcgctaccaatctgaccataactggccatgataattgtctggtctgccgccgacaagaaaatctatatatcccgttagtcacaacttcgatttcagaaaacagaatcaataaacattggaagaatccatactccgagcgagatggcaggcacaatatatttgagctgcttctgtgcgtcattggacgactcttttcttcgctcctctgcttgaactgtatcccctgattccacatgatgatcgggaatcgtgccgttggacacagcgccgttaacagatacggatcccagcaacggggagttctcggtaggagatgtctctggagccattatcgagactgtctatcgtcagatcgctccagattgtccgaaagtcaaaatgacttgactgaacgtctacggagaaatcaacaaaagaggagagcgagggcatctaaaccccaaaaagcccccacgtgaagataagacgcccctcactccccgggaccgacttacccgtttcggccaatcaaatgtccatcattcctatgccgctagacctgcaggactttgatctgcgatgacatcgaagtgttgcctaggatatagccctatcttgtacgggctactcatttaatacattacctcacttatagaactatactgataggtcatcgaacggtcgtaaattcggctgttgaataggtatctgaactaaatatatgcaaaatttatttttagttaactcccaattccctaagttcatgctgtcgaaggcatgggaaccggcccaccaggtgagtcaggcagacgggcagtcagcacctcgacaccatcctcagttacgagaagggtatgctcgaactgggctgacagaagtccgtcttgggtggtgcttgtccagtcatccggccaagtgcggtcacggtaggtaccaaggttgatcatgggctcaattgtaaagcacataccgggcttggcagttccaacagccttgttcttggcgtaatggggaatgttgggcgcacagtggaacagctggttaataccgtggccgcagtagcttttgacgacactgcagttgcggctctttgcgtgcttctcgatgaggttgccaggttcgcggaacagcatgccaggtttgacgagctcaattgacttgttcgtacattcacgcgaggtttccaccactcggacggcgtcggggttcgcaagtgccttgtctccaacatagtaggtctcgttgatatcgccgtggaatcccttatgatacagagtaacatcgatgttgacaatgtctccatcctgcaagggccgttgatcgggaataccgtgacagatagtctcgttgactgaggtacacacggacttggggaagttcatatagttcagaggggaggggtaagactaaacttatgttagtgtggtattgcgcaccagagagcaacctctcgtacatcacgctcaatacaagccttgtggacaacctcgtcgaggtagtccgttgtgacaccaggcttcaattcacgagcagcagcatctaaaacctcacgagccaatcggcaaaccttacgcattccctcttgctcctccttgttcaggatggtgatgttatgtcggccgataagtttttgctcggagcgggggataccatcgcgggcatagtccgggtgcgggatcgtcttgggaaccgttcgtttgggtgacagaggatagacgggcctcaaagaaccggcgtaagggaaggacgggtacggattgaaggtaccggtggctggatctggttcagaaactaccttcggaggaaaaaagttggtgaggatgttactctttttgtggatgctcttatgttcgctctagagtatatgatcagcccttgacttcccacataccagggcgcatgtactacgcatcattcagtcccatcatagtcctacgtacccagcttcgtttgaaacagtcctgcgaacagaagaaactgtccgtgccgctcttcagacatgtcgggcattgtagggtgcctgcatcgttagggcagtccacaccccggcatttgcgagtcgcaacttcagccatgttagaatagcaggagtgaaaagaaaaaaaactggagggaatatgtagtgagtagattggacggcggccaaaacttcgagaaaatccccgcgggccggcgatacggagctaaactgcatttggactcctataaacggatgactaatgtcgatcatctcattttggaaggaagggggccgacctcgcagcacgtgatgatgacttattcttccgtttcaacgcgtacctgcctttgttttggacgaccagttaaacttacatgatggctattccaaggcagaaagtggttgttgtgggtgctggcccagtaggagccttggcagcactatatgctgcatcaagaggtgacgaggtggaagtatatgagctccgtggaggtatgtttcactgcctggtgtgacctttcttttcttttttcaccttttggtggccgccattggacacaacccgattgtcaaggaagaacgcatatgtctttggccggggatggctggctttttatccaaggcacaatgtctcgcaaggtccctgtgtcaactctgctattaggagaaacttactccgattaatccatatcaccatatcttccatgccccttgcacttgtcctggctcagttgtgattcattgcgaattcttccgaactgacgccaataatccctgcgcatccgtagatctccgagaccctacgactgtgccattgaactttaccaagtctatcaacttggcgctctccgaacgtggaattacgtccatgagaaactctggtcgggatgatttgatcggcaatgttctccgtggagcgatccctatgcacgggcggatgatccacgggcgagaccgaggaggtctgtgggaagctgcacaggcctatgatgttcacggccgggtatgcaccgatcacctgcttggcagttgctattgctatttacactgcagatcatagctaaccactactataaggctatcaatgccatcgaccgaggaactctcaacaatgccctccttgatgagttggagaaaacccccaatgtcaagctatttttcaaccacaagctcacgggtgctgactttcggaccaacaaagcctggtttgagcgcagaatccccggtgagacacccacggccgacgatgccggtgtagctggtcgagtaccagagatcgaggtgtccttcgactaccttgtcggtgccgatggagcacactccgccgcgcgcttccacctgatgaagttcgctcgtgtcgattatcagcaagagtacatcgacactctctggtgcgagttccggattccaccctcggaagatggagacttccgcatttcgccaaaccacctccatatctggcctgggcgcgagttcatgttcatagcgctaccttcagccgacaagtcattcacgtgcaccttattcgcaccattctcgaactacaacaaactcgagacctcgccacaggatctgcatgaattcttcaactcctatttccccggcgtatgcccagagctaatcgagcccgcggcgttgagtgagcagtttgcagcgaacccgcatctcccactgatcagcatcaaatgcaaacctcaccatttcaacgccagtgtcgtcattatcggcgacgcagcgcacgcagtcctacccttctacggacagggactgaatgccggtctcgaagatgtccgtgtcctcttcgaggaactggacaaacatggagtctatgaccccaactctagcgtctacacacgcgatctcaagcgccaggcagccttccaagcctacacagaccagcgctgtgctgatacgcatgcaatcaacgatctatcgaaggataactatctcgaaatgcgcgccggcgtcaaatcgccgctctacaagctgcgcaagaccatcgaagaaactatcgatcgccatttcccgttccttggctggaaaacgcagtatgcccgtgtcagcttcagtaaccagcgctactccgaggtagttgaagctgttcaaaaccagagccaagtgcttggtcttggtttgagcggggctttggttgccagtgttggagctgtgtccatcttgatgtggaagtaccctcagtatctctcaccggtgggattggttcggtgctcacggcatctggcttgtgtcgggttgaggaccattcgaaaatatcttcatatttaaagctttttttttcgattttgagtggatatgtaacaatgtgcagatacctgggggattcctaacgcgtttagtttgttacacgagaaagtaccttaacatggacagcagactatggtagagagcatgaagtgcacaaaagggaaaggttctaatatccaagtctgaatttttgatcaaactaatataaacacctgataaccatacaacgcttttaatcccaatacctgataacaccgtccaatccaccagtgacgaccttactggactcatggggatgccagtccacacaagtaatagccccaccttcctttccaccagcctggatcttatgatacatcttgccggtcttccagtcccagaagcagacataaccaccgctgtcaccggaaacaaggaactgaccatcaggtgagatcttgaggtcgatagcgtatccggaagtattatgcccaacgaagcgcttctttcggttctggcggaacttgtccgtcgcgctgtagacgacaatctggttgtcgcctgactggaaggcgacatacttgccattcggatggggcgccgcacgcgtgagcgcgaacatgtagggctctgcgatgaacttaatcgggacaggaatgccgtattcccaagcgcgcagcgacttgtcatctgaggtggagatgaagcggcggttgtcatcaacgaaagtaagagtgttgacggcagccagatggtggtcatactcttggaccaactcgccggaccgggtgtcgaattgcacaatcttcttgtcagacataccggccaggaactcgtgtgagtgttctgggctagggttgaagcggacaacgtgcggtgtcttgcctgtggaaaaccggccaagacatttaccgtattcggtatcccagagcttgatctgtcggtcgtatgacccggtaaggaaggtcgtccccgatggatggaaatctgtgtctgagattgctttggtgtggccggagaaagtccgcaagagttcccgagagtgatacacatcccagagcttggctttcccatcggctgctgatgaaagcagcaagtggccagatttggggatgaatcgaagagaggtgatcggcttggtgtgcgatttccaagtttgcacgagttttttcggtacgtagttcttggtggtgccgggctctttgcgcaaatcgatatccaagtcctgaggcacgtgcatgtacgtccggccctggtagtcgtactgctctgatccgtgaaactcggtggtttcttgcgtggcaagatcaccttcgtaagcggtggcatccttactcatggccggcataggtgccgtggtagtcagagtctcgtcttcctcttcgatatattcctcgtcactaccaagcgcgcgctcttctccttcagcaacctccacgtagtcatattgctggtcattttggtatttcgcccagggtcccagatatgcgccctctccctccacaacactggagtcgcccttcttttgccgctttgtccgccagtttgcggacgcgctcttagtcggcttaatttgtacaatatcccggcctccatattgtgccgcattttcgaggcttccgataaattggtccggtagtgtcggattgcgagtgtatcccagactttggaacgtgcgatgttgcgcagaaaatgtggactcgctgatggctgcttcttcagcaaatccagtcggaacattctttcttttgataccgtttcccggacctgctggcttgaacgggttcacagggccctgggaaggctttgtaagatcatcgtatgtggcattgtaggtgagggcttgggatgaggcgttggcgagggccatctgcatatgcgcttggtcctgtaggatcgttagtcttatctgttcgtcatagctcaagtgtaaggcacaaagagattcgggaaggaggatgattatggggggaccaaacctctgtattgacctctggtgcagcaacgaccttggtcgcggtcgtcacagacgagggcatagctgtggcgtcatcatcatcgctggagtcataaccaagacctagtaaggcggacatgactaatatgttaaagagggtgtgaatgcgcagatctcaatgcccctttgcaacaacgtcggggttgaatgtggttgttaaatggtacggagtaggtggtggatgggaattttacgggcgtcgggagacccccgatacgaaggccggggaacagccaccgcagccaagctctttatcagccccaatgcagcttcgacgatagttaagtacgtcaattatgtctacctgttactcttcttacgcatatttgatggcgatggtatttctcaacaataaatcagttaaatgttagaacttgggtatcgtacgctcttcattgccaaccgcatgggaggtatatacaacttcaacaggccgaaagatacaacaagattaacacagaagaagaattaaaaacaaagcaaaagttagcaagagatgcaccaccgcgagtcaatcatacagtatctcgaataatccagctcacatcctcagctcgagacaccccaaagaaaatatctattacctctcatcgctgtagtcctcagatatctcaagactgaaagaattcgttgctcatccgtagtcatggccacccatacgataaggaatcatatcgacataccgagttatatgatatgacggccgtcttggggctgcactcaggttccagggtcgtgcgataggctgagaagaatgtccagaggacatcgacctaagaattttgtgacaacagctcatcggcagacggttccttgatctagccgggagaaccatgatgcatcgcatattcggtcttttcacgcagtcaattaccctcatcacggatcagggcaacaatcatgctgtaaagatagaagaagaacataagaaggtggaagccaagcttgatgaaggattcctaaacacgatttcgagtcagtcactgtgcggtaaattgggaggtagaaaccaaacataccttcttgtgcacgttcaacttgcggaaaatctcggtcgcatccaaaaggtgctggttctcgtagatcctgtattttcaaaaacgacacggttagcctaccgctgaagagggcttgcgactactcggggagcttccaacgtacttcttggcgttgaacaacacgaggggtaggttcagcacgatggcgagccagtatccgttgatcacgaagaggaaggtcaggaacgcgtggacagcggcttcggggatgatgtaggcgttgaggcggttgcaaaggtcgatagggttgatgtaatcgctgggaaaaaaaggtgaagtgtcagcttgtattcggcagtatgtgtggatcaaaaactgttgcttgggacgactgcgaagactcaccattcaagatcactgtacatgatcgtgaagaacacctggaggaagaggttgacggcgttgatcaacaccgacaacaggtaaagccatgcttcgccagacatcattgcgattttgacgttgcgtcaagtataattgacagaatttgaatggctaaacagaggatatgagtaaactgtcggcgacaaaagtgggtgaggttgaggtggattgaagaggccggaattggagatgtttgtggggttcttccgcccaaggaagacagacgaatcgcacagagtcctctccaaagagggatcaaagctcactcacaaaaacaaagctaaatgcactcaagctgatggagatgaaaaacaacgtactgagcagagatgaggtgggatcgaaagaaagagtttcgattagcgaactgcggtcggcggtgtcgggagggctggtcatcattagcgcaacccgcaaacggggctggtaacgtacatgctgtagtccagagtactcgataagaaatagattcaaggtgttgtagtcgaagtaaatattgctgattattgtaactgagttcttttgtccaggtggcaaccttggaaggttggtaggaggatgacgtggaccgtccctcgtggaagtacatgggaaatacggagtagatgtacccaacttcaacgttgtttatttggaggcatgaagggatcattaggcatgtctattttgtctatatacatagtgacaaactatagaccgcagcatacgggcttccatgcatctttaaagagccgatcttcaatccccttcgcaatgaccgcaaaacacgaaacgacgtcggacatggacaaggaccaagtccaacccaagacaaaacacaggatcattgaaaacaccctcgatggtatcataccagtgtatagcaacacgtaaggaccagctcatcgtttctcgacaagtaggaaatgcattgcactgtatgcaatgatgatgaaggccccagaaatgacagccagcccgataacatcgctccagtaggcctgggtgtcaaagccgaatgcgcttaagatagaggcaccgggaacttcaatatccaagccgtacttgtgatcaatcaaagtgaggtaagtcacttcattgacgatcaaggcctcgaagccatagtggaagatggacagctggtaatatggttagtagggaaagcatcactcaggttagagggaaactcacagtctgcaaccacaatgctgacttaggaatcgcatcgtgattcagcaggagaccggcgaagagcaaactgaaaagcatcaccaaactgccgataagattggcgactccgccatcccggaaaataatgccaatgaagaggcaaatgttggctgccgcgagattgaaaaggaccagaaccagcaaaaagcggaaaaattcaggccacgccggaatcagacccgtcatggggtatacaatcatacccatgatgatgggaggaatcagcctcagaggaacgatatcaaacacgactttggacgcaaagtatgtgaccggatggtaataaccattggcacgctcacgtacaaacaaaagccgctccgtggagaacacgttgagactagtcaaagtactgaaaccaaacagagccaagatgaagaagaaaagaccaagacgattctggaagcctttgatatcgtcagtgaggccatagaagaggtatccagataaaactgcgagaagaatagcaattgcgtaatgtgtgagcatcaacatcgggttgcgataaaggttgcgccacgtccgctgagaaaggatcatgaactgccgcaccagaccaactcgggcatagcccttagactgtatcacagtatccgacaatatgggcgaatttggtgaaccgttcgcagcctgggcattctgaacggcggttagaatctcatcatgaacaaaatggcaaacgtcagaatccgcatagctagccaccaaaatgtcgagatcactttgtccagatgccggaggagggagctgatcgggatcatcgaggatttgcggaggaacattgctttgttgacgagaaagacgcagccattgttgatgattatcggctacatccaatgtagcactctcgtcatctgtctttggcgtgactgggcgctcattatgttgctttcgggagtaaagttggcgatcctgctgctgttttagagacacctggcgtttgcttttgggtctccgagtcgcctctgcgccgcttgagttgtcttcaatactccggatcgacgcgctggtgacagacttgacggctctgagactgcttgatgcggtcttagatggaccagtgcgcccatccacagacaacgccacttcgtctgtatatgatgaatgtgcgcctccggcgtgcattgtaagatcaacaaggtaatctgcaatattgaatcccggtggacaggaatagcccacacggtcgaaatactgctggcatgatgagaaaggaccagaatagacagtgcgtccatcagcaagaaggatgagtcggtcaaagagagcaacaatgttcgagcgaggttggtggatggtgaagataacagtgcggttgtatgtcttggcaagcgtcaccagacactcaaccacattgaatgcattgtaggcatccaatccactagtgggttcgtccaggaaaaggatactagggctggtaaccagctcacaagcaattccgactcggcgcttctctccaccggaaatgccacgaccattgccttcttccgagccaatcaattgatctttgatgtgatagatcccaagttgcttttcgacctccaggactctctgctctttagctgcccggctcatatcccggggaagtctgagtagggcgcttgtcaagatggtctcatggactgtcaaggtagcaagcatcgtgtcttcctggtcgacaaagccaaccatggttctgaagtcattatcatcaatcttttcaccgttgacataaaagtttcccttcactgagccacgtttgttctttcgcgctaggatatcgaggaatgaagttttcccagcaccagatgctcccataatggctgtaatttggcctggtatggacgcaccttgaatgccagagagaatctcttttccgtttagtgtataagaaacggtatcccagtacaaagccgcggggtgatagtctgccaggagtttggcagattcgtcgtccgaatcatccgaaagagacaggcgaatataaccgcggcgcgcagcacgacgggacatataccagatgattagaatgaccgcaaccacaaagagtgaagttcccgcgatcacgccggcgatgagtggagtgttgattttcttcacggggcgctcgtatccaggttcatcagtcttgtacatgcactctcctgaattgcatgacaagaagatacttggatcaccgaagacgcccgcaattaatccgttcatctgaggctccgagaaaacgctcttggtaccctccagggtcgatttagtatcgaaagtagccgggcccttgatcagttgatcaaggaaatcgctcaggtcaatcgatccattctcgccacagaggaaacggcccggaatacattcgcactgaaggtgctcgcacttgtagtgagttgtattggagttgtagtctgtttccgtgttccactcgcaagtgtctaggccgcaatagaatgactctttctggtcaacccaaaattggaagctacatgtgtcatcctcagctttgcaggaaaaagtcacttgaggtttgcggccgtcgagctgtttcaagatcgcacggttggtcacatcacacatttgaaagttctccttgaccgtggcaccttgcttataacaaacgcccccctgaccttcgggcatcatcgcgttgcaggcatcatctgagttgcagacattgcagttgatgccttcccagccatccttgcattgacaggtgttggaatcgcgctgcggtcggttcaagtcgtcagccaacgaaccgcataggggaattgaacagtcgtcgcctccaaatccgggcgggcatgagcatttgccgttgaagttattgcaatccgcaaaatgagtgcagttatagttgtcgagctggcagttgaagcaagctggacactcgggacatccgggtggccgatcatcgaagagggagtaggattgcgtagcgaggtttgcatcggtaaattcgctccatgctgcagcagaccccagtaaaggagttaatgtgagaagcgaaagggatattgcgccagtcaagcgcatcttgtggaaaggatgacagcagcgtgtcctagtacgcagcgataccaacaaccgaggaaggagtgcggggcggaccgccgaattgatcaaattagagaataaagctggagcatatagctgaagtaaaagatagagacaagttcgaaggttgagaagcagaaagcggagagattcagagggtaagattagccccaggcgatgacgcgggcggagaagcgagaggaggctgggcgtcaggaaccaacagtcttatgctatgcaagaccgaccccgatggtttttcattctacatcaagatactagataattacagcaacatgctagataattcgtaaattccaagctttcccaccacagcattttttccttcccatttctgtatacaacataagtggttctacctcaatgcggggaaacacgtgatgccgggggatatataccatgtcgaccagtttagaggacaaaaagcaaaaaaaaagaagagaagagaagtctatagaaagtagctattctttgctacaactgattcgtagtcttttatccacgagcgccgaggcctgggacgtatgcctcaagcttgggcaatcctcccaagaactgcaaagtgtgttgttagtagatttgtatgtcgaattcgttgaatgcaatttctgatagagttaattcccttggttgaacggattaaccgcaacaaggatatggagcaaaatggaatctcctttattgcacaagatcattgaaagaccaccatcggaacgtaggcacctatgggcacctatggagtattgccctaatagatcagctatgtgccgggaacctccgtgaacaaagaaatagggcggggatctgttcctcgatacttgctcggtagcaagtcctggacgagtacatatattacgaaagttatggcccgcagtatgcaaacttccagttcaaaggaatcacattcattttgctacccctgctagggctacaaatgccacgtcactagcagagactttcaagctcgcccgctttttagctctattttgaatgcctcgactaggtactcgaatttaccgccagataactggaataccgtcctgaatctttagctacagtaaaacaacaaacagacagtgttgaaactttccttgaccctcaacatgtcgcccctagacaaacgcagaaacagtgagatcatacacaagctggaggctcgcatagtcttccacagcctcaccgatgatacccatgatgagacactgctcaaaccctacactcaccacttagcacgggcatgctggaacggtagtcggatcgttctccgtcagacttcacaggaagcggagggaatatcgaccttattatggagctacatagtgcatgcaacgggcgatgggacgattttgggatcgcggcatagagcaggatgatctcgatacatggcttgggtttactggcacgtttctgtccaatcttggtaaattttgttggtctccaccgtggcttgcaagctttccatccatgacctgaattgctgatgtcgcagtaaaaggatgacggagatcgtaaggctacccctggtgtttccaaagataccctgcgcaagatagcgagcatatcacctgaggcaagcgcaaagcttgaggaagtccttgatccgatgatgacagcccagccggctcaacttagtatcgtcatcaaaccaaccagtcgagttactaccctggaaaagagtggattacaaaggaagagatcgagactgccaccaagataatggaaaccaaggggctctaaccatcagactcccaccgctgtcatatataatcgcccgttgcgatttaagcaatagcggtgtgcagcgctgtctggtagatctactatcccaccctcagctcaagcccaatctgcgcacacctattttcaacgtgcatgtcctccactttgcaaccgcacatcatgatccagaccttctttcatggttggcagcttccatccccggtggacttgtagtgcggggacaacggccctaggacatacgctactccacattgcttcgttacctttcacttccaatcagactgcactttataatccagatgtcgcggacagtatacattgtgcccgcacccttgactctaggtggtttcctcatagaatgccaagccctctgcatatccagttcccaaagccacaggaaggctcccgaaaaccacagccactgacggattcccagcaacaggcacaaaatgcaagtattcggcttttattggaatggggagggattgatgtcagggcaaaggatatcgacggcaataccgctttacattacttagtgaggatattgttgaaatggttcgacaggcggatggaggggaagaaacgtgggagaacgcgacaaaccgccatggcattactccacgacagatgtggtgtaagtgagatgtaaggcaaagatgacaagggaaggaatattagtttcagccttcaatttcatgccttgtcgtcatcgtagaggatgtcctagtacctcttcttttcggcatactggcttaattgcttgggtgagtatgaatgtatggataggctcgaattttattaagcattttatattttgcttgcctaaatagaaagtatgttattccctgcatgtgctggatctcattttaaatatattgatccaggtatacaattctagaacctagtttactggggaaatttccacaacttttgtttgtgctaagtcgaggccgggatagcaatgtaaattcttcccggcaggtgtgaagcagcgacttcgcgcaccacgtggaccaggcttgtacgggaaaatatccaagctcttggaaatcctagtcatgaaattcagttgaggtcattttctaatacttgaactatcgatgacattctgatatagcataatgtagggcgtgtgagaacaacctgaaaattaatttagacctagaacaaattccaagcacgaacaagctaacgcccgatgaacgacctcgacatatcaatcaatctacgctaaggtgaggctggatcgggaacacgatccatcacgtgataacacggacagctcataggtagagcggcggtagcataagggaacaagttatcacccattcagccgaacattggaacgtccctaggcaaagagagttgattatagctacttcgctcggtaattcccactattataaaccatggtgaagattgaggccttcgcggttgaacaggtacctccccgcattaccccatggctgggtggtacttgtctgctccctctgtcgttacagatgtgttttgttaaccgtcctgcagtggatggacaagtatgagaccactgcgaaatataataccgccgagacctgctgtgcatccatctccgtcgacgatctccgcgcgctctccgatgacaaggagtccaaccctttagcccagcttcaatccaccaaactcacatatggggcgatccgtggctctgataaactacgaaatacactggcgaatctgtactcggtaagggcaccgacgcagttgccgaaggaaaatatcttgatcaccgctggcgcaatccaagcgaacttcttgctgttgtatacgttggtcggcccaggagaccatgtaatttgccactatccaacatatcaacaactgttctccgtccctgcgtcagtgggggccgaagtcagcctgtggaagtccaaagaggccgatggatggcagctggacattgaagagctgaaaggccttatccgacccaacacgaagttaatcatcataaagtatggatttcctgactcttattacaatcatgcaaggcgtgcttttttttcctgaccatcattctcatagcaacccgcaaaacccaactggagccatcatcccgcgccagactctccaacaattggtcgatattgcccgcgagaaatccatcatcatccactccgatgaggtctatcgcccacttttccacaacatcagtcccgcggatccgaggttcccacccacacttctttctatgggatacgaacgcacggtggtgacaggatccgtttccaaagcctatagcctggcgggtttgcgggtaggctgggttgcgtcgcgggatagttcgatcattgaatctgttgctaacacgcgcgattatacaaccatctcggttgggcaaattgacgaggcaattgccggttttgcattagcaccgcattgcattcacaatcttttgaaacgaaatatcgatctagcccggactaatctctctattctagagaagttcatcgatgctcatcgctgggcatgtgagtggattaagccgcaagccggcaccactgcatttgtgcgctttaacaagatgggaaaacccgtagacgatgtcgctttctgtgagatgcttcaggaacggaccggtgtgatgcttgtgccgggaagcctttgctttggagtcggagaagacttcaagggttatgttcgcattgggtacgtcaatgaaaccgaggtcctggagcggggcttggatgccttgggtaagttcatggaagatggatatgaggatgtaccagtgaagaagcccttgcaaaagtaaaaatagccatcccgatgccactggtcaactggacatgcaaactagccttttgtactctccggcaactactagccgagcccgtttgtataaagaagaatcataacaatgtcagaacgatctacagaatgaaaaattaaatcattattgaaagaaacaactgccgtacaacgtgtatgtggcgaatacgttgcacaatgttgcatgtcgtcaggggatcggcacatcccgaggtccgtgccgaggcccgtttcgatctctcctactccggacatatctcaaccttaccggatccattagatgaagtcaaccaatattgcttttgatctgtgatccaataaaaggcagcgaagccgaggtatcagtcaaagagtccctataacacctcatctgctcttccttccagagctacattcaaagccgtgatacctaaatatcatatccctcgagtacattacttgagcatactatcgatctcactcctagatcatatccacttgagcttgatccttgaatatcttggtcataatgccgctgccatctttgtccggtaggtcataccccatggcgggactgaatgcatggctaacaagcggactctttgtgcagatattcccttgagtcttgcactccctgccgcagcaacgacactcgcatatctcaacgcaagatggtcggtttcttacgatttgaacctcctcagggggttgctgaagatgtccgcaaagtcccgcattgccgaacgtggcgaccgcttgaacctcttctacacacttgaagcctacgcactcgatcctaaaactgcaggaaacgatttcattgtgtacaatggacgaacaacgacgttccacgaaggctatatcatggttcttcgctacggggcatggttcaagaaagtccacggcattaagcgcaaggagattgttgcaatcgacttcatgaactcttccaccttcatatttatgctgttgggactttggagtattggagcagtcccggcatttatcaactataacttgtctggcaagccgctcacccactccattcgaacgtccaccgcaaggcttttggtggttgacgaagaagttcgtcactgcttcccggcggagcaggagcagatattgacatccccgaccttccgtgatggcaagggaccggttgagatcgtatttcataccccggaggtggaagcgcagattttgggaatggagcctacgcgagaggatgacaaggcccgtagtggcttgattcctcgcgatatggccatcttgatttacacaagtggcaccaccgggcttccaaagcccgctattgtcagttggaaaaagtgctggtctggtagtttgttcgtcaaagattggttgagcattacttcctctgacagattcttcacggtaaggtccaaacttataaatgttactgcccaagctaacctcctgtagtgcatgcctctttaccatagttccgcttcgatacttgggttcataacctgcttgatgagcggatccgccatgatcgttggccggaggttctctgcgcgcaacttcatcaaggaggctcgcgagaacgatgcgacaattatccagtatgtgggcgaaacactccgttatctactaggagtggcacctgcaattgacccggtcaccggcgaagaccttgacaagaagcacaatatccgcttggcatttggaaatggactgcgtcccgatatctggaaccgcttcaaagagcgttttaacatccccacaatcgccgagttctacgccgctaccgaaggcactacgggctcatggaacctttcgacgaacgacttctccgcgggtgccatcggccgaaacggtgctttgggagatattgtccttggtcgtggctctgccatagtggaagttgaccacgaaaccgaggaaccgtggcgtgaccccaagactggtctctgcaagaatgtcccccggggtgatcccggtgagttgctgttcatcctcaatgcagcggatcccactgccaatttccagggctacttcggaaacaagaaggcgacagaaggcaagattatccgcgatgtacttaagaagggtgatgcctatttccggaccggcgacatggttcgatgggacaaagagggtcgctggttcttctcagatcgactgggtgatacgttccggtggaagagcgagaatgtatccaccagcgaggtttccgaggttctgggcgcgcatcctgatgtacacgaagccaacgtttacggcgtgactcttcccaatcatgatggccgtgccggatgtgcagccatcctgttcaaccagcaggtagcaagcggtaacctctctgataccgccctggaaccctcgcgtgaggtgcttgatactctagctgcgcacattctcaagaacctgccccggtttgcggctccgctgttcttgcgggtcacgcccctgacgcagtcaaccggtaataacaagcaacagaagcatgttctccgtaccgaaggcgtggatccagctcttgtatcgaagaaggaccgactgtactggctccagggtgatacatatgtccccttcggacagagggattgggaacggttgactggtggtcaggttcgcctttgatccgtctagttttcttggacttgtctcgtcttgtgtgtcacctttgccttgtcccgttatatctctaagatttttcggtcctatggcctgattcgtagcctcattcaccttaagataccctcgacagccttcaattcaacaatctatatacgcccattggggctgacctggtatcactgggctgagtttacacgtaggacatacaagaatagtcagtgttctctgcccttgacgatgtaagactaagataatctgatctatttagcccaagatgacctcggaggcgttacatgtgtttctatatgtctttttcgatgtatacgaaggcggcaaaacgatatgtatgactgttggaatcatggacaattatcttgcctgatattcttttcctggcctcgggtcagcttagtaggctatgcatgacgtggaactcggtaggaaatcccgagtcttagaaggcacggcaactatcggaaggtaccattagaaactgacaggaagggactgccctcaggcaagagcgttgggtttatgcctaaggaaggaacgataaaaaagtgagtataaagggaaaggtcaacccagacattatagcccccaactcccatggctcagatgggatgcgccctgttcctcgagcaggctagctgctgctgaagaacctttgggcccatcttttttttttatcccgttccggatcatttgaagctattcacacttctggcccaccataaccccaccctcgcaataactctttcagcgtcttttcttaatgttttcacaacaattatagtagaccgcttacggggccttatcatgctactttgggggtcttcgtagatatatattttaagaagctgtatagccttggacatgctctgatattgctatgaaagattctggatatattcttctttcaagggaactaccccgcagttctcttaacgttcgacttgtcaaactagttgaaattgtccaaaggcgaatcagcctcgacaatcttccacacctgctcaatctgtgctactatttccgcatcgagcggacccttgctaattgcagcaagtgtctgattgagctgctcgacattacgtgacccaacaaccacagcatctccaagttctgctttgaggtcggagttatgcaccacccaccgatatgccaattcggccttggagataccaaattccttggatatcttctcccacttttccaagccctccagcatgctcggcttgttgaaaagcgcattgtagatcccaccaatctgtgtctttggatcccaccgaccctgcccaccggagaccaacgtcgcgacatccttagtcaggaatcctcctgcgatgggcgaataagcatagaatgagatgttgtgtttccgcagtgtgggaaagatctctttctctgctcgtcgtgcaacagcggaatagctgccttggtagacacttggcacgacataattcttttcacagcagatgcggaccacctcttcaacctcctcagccagatagttggacagcccaaagcgcttgaactttccagccttgtgcgcagagtcgatactggccagcaggtcttccaatgagcttctgcgttcgggagcatgcatgtagtagatgtcgagctagaaataggattagggattgggtctttgcagcctcagattacgaaagaagctcacctgattagtttggagaagggccaaactctcgttcaagcttgtaacaagagactctggggtggagggctcaggtctaaacccgccagggaatttcgaatcaatggcaaagcgggaatcggcgtgaagtttgcccaatagctcctcggagttactgtagatcttggcagtatcgatgcttttgatgcctttgtcatgcagaatatcgaggacctcgctgatggactcaagagttggataggcggcttgatccatgattgaggctccgccccagacaatcttgatgctagccatgatagatggttattgaaggatgaaggaaatatgaatgtctaaaatcagccctgacaattgggttatttatattccatttcaagcttacaatgctatagaagatttataatcaaagcttcaaaatcaaaaacctcatacaagtacaacgcacgaattcatccgtccgtgggcgtctcgtctcccccggggccgccggggtggattattcatcgtaatagtgcctctcacggtacaatagatagtcttatacaagcttaagatagtatatgagagctatataggttatttgacttcaattaaatctcactaggatgggggaatccagtaatccatctgtttggcgtggtgagaattataaagtcctagcaatccaagtttatacataggaaagccgtttattaaattgcgccctttgcacctttttccgtgtacctaagaaggaggagatagtcacagaaaatatactaatgaaaactactgaaaatactaccaaaatgtcatgcaaaggccttgtccaataccattctacggggtcaagtatagagccgactcgggagcaaatcggcttccccgcatgcatttggagatccccgctgtttatttccttctctgcttttgtttttatctctctcctcaacccatcatgtcttcaaatttgtccttactcacacaccttcgcccccgcgtactggcgcgaacccgaccgggcgcaattcgcagtttcaccatccctcagcgtctccgctcagatgcttcctcggtagcctcggccttcttgtcgcgcttccaatctctagggccacaaacccgcacgcaaacgatagatgcaaaccagctccagcttctcaccctcaccctcaatcgcccgactctcttccccggtgccccctccctatcgaatagcgctcccgctccgcaatctgcagtacccgtgccgccgggctatcacctcgcgtatttcacacccgcgttcctggaaagtgaacttggggcggatggaaccgatgtgtcgtataatcccgacgtgcctttcacgcggcgcatgtgggccggcggcgaggtgctgtggccccgtgtggatgggaaacccaatctgttacgggtaggacagcaggtgcaggagacaacacgggtacttagtgcggaggccaaggttgtgaaaaagaccggcgaggacatgattgttgttggagtcgagaaagaattcgccaacgagcacggcgtgtcaattattgaccgacggtccggcttcccttttcaagaatcccgctgttcaaagtactgacaatatcattcacatagcaattgggtgttccgcaaagctctacctgttccatctgcgtcaacgtcatccagcgctcttccgtccccaacgtcccatattgcgaccccaaatcctacctcgttcgccatttccaccgagggcaacgcccatacgcgaacactggtgcaaacgccggtgtcccttttccgcttctctgctctgactttcaaccctcataagatccactactcactgccctgggcgcgggatgtagaaggacacaaggatattgtagtacatggtccattgaatctgatctgcattcttgatctctggcgtgacacgcgccagaatgtcaccgattctaccttggttgttcctgggcgcatctcttaccgggcaacgagtccattatatgccggggatgagtatcggattgtgcttgaggacggcgagggaacagaggtgcagattattgggcccgggggagtagtggccatgaaggctgagatccactaaatatgaactgcacaaataaaccaggtgtagaactgtggtggttacagtttgggctattcctgataaaatcgaaggacaaaaagctttggggcgtgtagatccccctcacgggctagcgaatccacttcttttccctttttttacctgcgatattcgtatttcctcatttgctgatcgcaataaccacaaacaataatgaacgaaccttcggaccctgatgcagagacatccgcccccaaaaagagaacacgggtgcaattttcgtgcacggcgtgcaggtatcgaaagtaagctcaagttcaacgcatgacgtgcatacatcatacctagcatatcagatattgatccactacagattgaaatgctgccgcaaccacccttgtaataattgcaagaagcgaggcgaggccacatcatgcacctatgtcgggcgcggaccacgagccaaagcccagcatgggcgctcgagcccgactctggtccaggaccgcctgcaccatctcgagaatctagtgatgtctctagcacagaagcagaggtctaatctcaatgttgatttcaattcagtgcaatcgggggatcgggatgctggcgcgatgcgctcacttgacgctgcgttgactccggttgacacgggcacgctggtcgtcaaaaatgagggaactagttatattgacagtgcaaattggcgcgctatcctggaagaggtccgtattgatctaattattgctgttctctgaaatggttgtgttgacgggttcttcaaatttgaagattaatgacgtgaaagaatgcatcggagaaaattccaacgatgaaggcgtcgatattgacccgtacgatgcctcgtcaccagttctactgcttggtaatagtcgtccggtgagcaaagaggagatgcttatggacatccctccacggtcaatagccgatcgcctggtctctcgattcctcaagacatctgaaccggcacgaggtatgagattctcaaggaaaacaacaagtaccgagtactgataagccagcagtggtaattcacgttcccacgtaccaaaaagagtacgaggagttctggctacacccagcagataaatcatttacttggatttccctcttatactcgatcatggctttgtccgtctctctacatcatcgaggctcagagcagtcgccttctaccatggaagactctatcaattcatgggccatattccggaaaaggtcatcgcagtgtcttatccaagcaaactacatcaccccagggcgatacaaaggagaagcactattactctactcactcaccgagttctaccgtacccaggatgcgcagattggaatgtcctatttgcttgggattactattcgcctggctatgcgcatgggctatcatcgtgatccacgtcattacccaatgttatctgccatggatggggaaatgcgccggcgtctctgggccctgctcgttcagcttgacaccatagtctcattccaagtcggtgtccctcgaacaatccagccttggcaatacgacacagagttaccttctaacttgtgggacacggacttcgatgagagttccgttcaattgccacccgggaggccggataatgaaggaacagattgctcgtacatgagggccaagtctcacgttatgagtgtctttggtcaaataacagacctggcattctcccaagagcgctcatcctacgatgagattttggaaattgaccgtcgtttggagactgcgcatgatatgataccctcgttcttgaaagttcgaccaatgacgcagtgtatcgcagacccagcagaattgaccacgcggcgcttcgccttggagctcttgtatcaaatagcacgtcttgtcctacatcgccgctatatcgctgagaccaataccaaatttgcttactcgcgatcagtctgcctggccgcagctcggcaagtgcttcaatacaacacagagatctggtccgagttcatgcccggcggtcagttgttcgcagcgcgatacttcctcaactccctccaaaattcctttatactctcggcaatgattctttgcctcgagatgtcccaggatgcagatcgtggtcatgcttcacgcctcgagcctcgagagcgagcagaattcttgcttcttctggaaagtacccatcgtatattcatggaaacccgtcaccggtctgtcgacacacagcgagcagtgaatgctttgactatcatgctcaaacgagtgaagaaaggtgactcccaatcttccagttcgactgctgggcaatcaatggcacctatggatagtaagtattacttttctcttctcgcaatatcatgctgattatattacccagattatatcttaacccaatccaccagtgcatcagtccttgatcaacaatactcaacgtacacatccaatattagcgaattgcagtctgcaatacccaaccccggccagacgtcatataactccctgggggtcattgaagacatgcttgatatacccgctcaactcgactgggtaagatcccagccatgcttaacacaactaggactaatcctttatttccagaacctgtacgacagtcacatatcagcagtcgaaatggccaccaataacgacatttggtactctggtggtccagcaattccgtatgatttcggcgcttatcctcctgggtcatcgtcgatagatcatgagagctatcaatgacaatgtgaactatacaagaccatatcatcaatacatatctcgtaaaaccaatatgtttctgattaaaagaaaggtctagaatacaaaatcgaaccaaatccagagagtatgtactgagtatgcatccaccgagagtatgcatccaccgatcttgccgaggcggctgcagatcccgctccgcggaaccggagcttttttcttgtctgccaggaacactacactccaagcaccaagccgtataaatcttcttatataacctcctaaatgcaacccatccgcacctcgcgacttctgagtcgcgcaactctaccctcccaacgccagaatgtgtgcgcagccccccaccaactcaaggcaagcacgaggacaataaacacaacacaacggccaagtctgcgcctacctctactccccagcaatggcaccaaaaccaccacacgagcatttggcctgcctgacctatcctccttcctccccaacagcaacaataacaaatccccacaccgcgtcctaaccgccacccgcaacctcccctacaacccaaccctgctatacaaagtgatctcctcggtcgaatcctacagccaattccttccgttcctcaccgcctcgaccgtgacagcgcgcgatcccgaaacggggtccccaacacaagcgttcctgaccgtcggctacggcccgctcagcgagacgttcacgtcgcgcgtgatctgcgacgtcgagaagctgactgtggaggctaagagcggggccaagtgcggtcaagagggacagggtgcccaggctagtaagagctcttcttcgtccgggctaagcgggttctttcccggtgcgaatgagggccttttcgagtacctgactacgaggtgggagctggtgccgatttcacctgctgggacgcagggtgggccgttgactaaggtcaatttggaggtgcggtttgagtttcgttcgcagatgcatgctactcttatgagtgctgttgaggggcagatggccggggttatgattgaggcttttgagaagcggatgcgggaggttgagggtaaagggcagtgaagtgtcaattgtagattggattgtacattagtggagttttcgtattcgggcataaatggcatcacactacatatgactacttgttagacttgcatctcttcgactcttgacagcggaagggaaatagagagcatcaccaatttgattctattggatggatcgctgtacatgctcaatcagaagcctgtgagaatgagcaatgagaccaaaaaaaaataaaacatgatagtatataatacagattatccgaacacagaaatgattttcaacttaaagcatgctcatactccgatgacggttgatagagttgcgtgagttcttcatcgagccgacagcattgtagttatcgaagaccacatcccagttaatccgatcccaccagcgctcgaggtactcatcctttccggcaataccgtagtccatcatccacgcgtgctcccatgtgttaacacagagaataggctgcacgtcgacggcaccgggcgcgaggctcttctggttctgggcatgggcgcccatcgaaccggcgaactggttgcccagctgtgtctccggggtgtgggtggccatgtcgacgggctgccgccgggagtgggcggccgggtagggcgagccggcgctgtaggtgcagaagatgtgcatcatgccttcgcgctcgaggttcttggcgagccacacgaatccggggccgaacattgagcttgctgtggccaggaaatccaacttcagggactcgacggaggagcaggtgtcgacgatgtccttggcgaacttttcggggacgctggtggctgtgggggactatattgggcaggctggtcaggattgaatatgtatataaagggatttatattgctactcaccaggcagttgaagaaaaagtggttgttgtgggccattgaggcatagttgaacaccgaggccatctccggacgcttggagtatttgaccagcaattctcctggtttggcatctgcgtcgacggtatctattgatttcggttgttagattggtatctccgtgtgcaatatcgctcaattatcggattggggccgaattagatcaatccatcgttccacagggtcggagtgtcgggctcaccttgtgtcaacaggttgagtttgttaacgagaagactctggtattgggtccatgagaagtcgaacgcctcaggcgaaaggaactccggaacaccattctccttatagtaggcgtcgtgctgcaattggggaatgcgatggatagcccgagtctggaagcgtgagaaggcggaggtaggtttctggataaaacgcggtcagtcaagacggattgagcggcggagaaagtaagtctcactggagagaaagaggaggctgcgcgcaaagcgctttgcggccgggcgaatcggttgaacatgacgagcggcactatgaatggtcgggttaatcatacagagcttcgctgtcgaagaatttccctcccgacgttctgcccgatcgggattagtgtggttatgtaagacccctggcccaacagccaatcacatcgtccatatctacttcatctctctaagcgccttgaactattctgcacccttggccttcgtccaatcctcgtcctgcaatcccctggtccgatgtggtactgtaacaaagatttgacttagcgcccataatttgccattttaatcatgccgctcactctgaaacagcctgggtgctattttaggactgcggcgcttgcaagtactctttgtctacaggatgacagtgctcagatgcctttcaataatgatatatcctggctctttgactgatttttgtttcagacggaagtcaatgcctttgtctgtcagcaattgtcaatctttctctgtcaaggttccttctgttggtctatctacttgcttgcgttatacgtgaagattctgtcaaggacgctatcagtctatatctttcggaaactcctctgaatttgaccgtcaaatactttcattcttctcggcctacatactcacgaccagtatgacgaggtcacggccatccgttctactgctcttcaccctgatggcaagcatccaaccaggactagcatatagctctttcgatcttctctcaagaagctcagacgcttgtccttcctcattttctcgctgcggcggtacgaaacttccaaatgatttctgctgtccctcagactccacctgcatcagtctagatcaaggcagctcctccatctgttgtcccgccggtaaagattgtgactatatctcgccgattacatgtgatatacagctgcagaatgttactatctacccggagagtgtcatcaagacaactcgtctgggcgatagccttcccaaatgcggcgatgcttgctgcccgtttggctacacctgccagggggacaacacttgttccctgaaccaaaaaacctccactactgcaacagaagctttatccagctcctctatcactacaacatcatcatctgtttctagctcctctaccaacacagactcctcatcgacaacggctacaacctcaacaatctcccaagcaactatcacacccgtgccatctccatcatcgacaacgggtacaacctcaacaatcccccaagaaactatcacacccgtgccatctccctcatctgaaaaatccacaaactccactacatgctcagcactatcaacctcttgtccctccttcccagctggagctctagcagcgggcttcttccctggtgcggtcctcggtgctgttgccgccctcttaataactttctgtttccgccgtgcccggaaagacgaatgtgaaatacaagaaggcaaaaatgggcctaattggtcccaacgttcttcttccggggcaagattgtgcatatcaaaccccataccccaagacgatacctcgtaccgcacagacttcctccgatgcccaccacgagccaagcgctcttcaataggaggacgttccactcgcactgtgatccaccgcaccggcagcagagtgcggagtctgttctccggttatccaaggcaaaccgctcgactagacaaggatgtgccacctatccctatgccaaaccctatgcatccggctccgtttactccgccacgacagcgtcagccgagcacagaaagcatcacggtgtattcaccgcctgaatcgtggctttcgcaatctcgcactttgttgggaccaagtccataccctggtgataccgctaggccagataccctgtttagcgacctgatgcgggttgttgggtctcctcatgatggcaagggaaagccaccttatccgactaatgataattctcgggaaaatccgttcagagatcctgtgcgttgataattgaaggatgtgaagcctacggggttggattgagccgtgcgctcagtcatcttggttcagatatttggtcgttctggcatattgattgtgtgccacgcacgatatccatattgtattgtttcccactttgtttcgaggtacctgattaattctccatctaattcaaatatagtgtaccgctttatgtgcatggtcaatatctatctacgaacagtgacacaaggccctgggtaggtatatcctcagaaggaaaaatagttcaatgggtgtatataactcctagaatacataaatttcgtattactctacgatgctgccccgttcgccttacgtcgagccgcaattctcttgagctctttgagcaacccaacaacaagagggacaccaattggtcccagaaggggtagatagacagccaccttgtgctcatcggggaaatagacctggcccaccatactcttttcgaagaagctgcgctcagcttctgtctctgcgactcgggcgctggcaagtgcagcgccgaagcgaccctctcgcaagtggacacaagaggcactcaaatgagagagagtggtggagaccgacgtagccacggttgccgggatagggatggagggtaaagacttagtaagacgggcaagcgagcccattgttgatgaggcggagagcaacaagctggccgcgcggatgcggatagatgtctgaagacggagtggaagagaggcaggggtgcttggagtgccgaggagggtcaggagttgatgagagaaggtcatgaatgcaggacctaaagagtccagggagaggtgggaaggattagacggggcactctgctcgccggtgttggaaagcggcgggttaagaaggaaaaccccgccccattgggggactatccaactagaagcacggttctccttgacaatgagtggagactgcgaagggtctgggacgtagagaatgaaattgatcgtcgggccattgccgatgctcgggttcagcggccactcggcagcattgacgaaggcacttaaaccttctttcttcaatgtccatgccgcctcggattcatcatactcgggcttcggcgcggtgggtgcaaaattggcatagagctgtacttgcgtgtcgacagtgaaattgctgataggagacaatgcctgcaggaggggggagacatattctttcaccgcagcctcaatgtcccacgaggacggttcagacccgggggtaaagagtgaaaaggagaggtggtaggtttcggcatatttcatcgatcggcgcagtcttcggtcgatatcttcggcgagttgtggtgaggtcgagtcaagcccagcggtatttccagacaagatgtgcgctatagtagccttttcctcgccatataattgctgaagctccgccgcaatgaaagtggagaggggggagttggaggaagaaggtacggggacctggctcggcgggtagaagatatcgagctgtgtcgcagctgcatgaagctccgaccaaggacttgctaggccatcctggggcagtaatcggacggtcagtgccgtatccgctgtctctttcgcagggtattccaggttgtcttcgccgttatgaactgccgtcgtggtgccgttggtcaacttgagccgaaggtggtgagctgcgaactcgttgaggtcatcgagagtatgctgcgtcgtgcggagaaggtgctgggcttcgaaagattgcatcgaaggtgtcgcaaggtgaatatccaatggaaagactggtcggcatgcctgtcaaaattatgattagcatctaccaagtcccaaagccaaaggcgatgccgcaagccgtaccttgccatcagcccaatccaccatctcctcgatggggagagacgcccggtagattgatgttgtcttccaccatatcggaaatccaaggaatattattacggcccaaaaggctgctatcactcgaaatcgcgtttgaagggcggccggggtttctgggggtggagcgcgcttgacgctgagctggtcgccttgagaggacgaagcctgaggagactcctggtctcctgttttggtcgtcatggtcgggacatgctttgtgctctaaatcggagcaacaaaggaggaagtgttctcaagtcgattgttgaattgagggagtttgccgggcggagaagccaaggactactacctaggtggccgcatggagcaacaacagtcggctatactccgtacgacatattttttgagctgaacttttagtttcataatctcttaattaattgatttgggggtgcgatctctgcacccaatggctcaaagcaattcgcatccaatctagcctttttaaagaaagtcccaaaacgggtctaggatgccatcatcgactccgagtgctcttaaatcacaaaaaaacaagggtatattgacaagtaacgccgatccgatgtagcagtcaaaaggctaggcctccaccgctgtacctccacatgcaatgtctagtattccttctcgaagatcttttgaataggtttagcagcctaaatgtcatgaaacttattagcaaactcatcgatagcagacctggacaagcggtataacatacatcaatgaacttttcgagatcttggtcgaggttggcaaggtcattcttccttttcttgttctctgcgatcaagccctgcttgcgcttcaaaagctcttgccgcgcttgctccagcttctctcgttcaacatgctcgtgttcgatgcgggcaatcatgaggtcatgttcgctggaattgcgatgttcgggatgaagctccaagaattcttcgaccgggatcaaggggagggagaggtatttgtgactacagcaaatatgtcaatttttcgccacagtaagatgagatgctgtgagtaggaaattcagatcacgtactcatatgcctcgcaagccgcaatctcgcctgtcagatgcctctgttcatagtacaagttctggagctgaagatgtagccgatcgatttcctgtcgagcctccgcagttgattgcttggtgtcgcgcacgcgaaaaatggcatcccgattctgcccgcgaagttgggccagcagtgcgaaaaggagtttctgttgtttagatgcggctaaagataattctcggaccttggcggcatcgttgggctgggtttcggggttcaggatggtgagaagatgctgacactgcaccagagtctcagcgctagtctgaagcaccggcaagagcgactcatcggcgacgatttcactgatagccatattgtggaaatgggatgaatcggtggcgagagatgttgcgggagaggcgggatcaatcaggatgttcggggccgcagtgtgcctcggggacttagtgtggttgggaacttgcccttttccccccagcgctcggttttcccatcttacactccccctcctttttttttgtactttctagatcctctatatgcccctcattccttgtcatttaaataagctcgtttcaacccgaggttgtgtcttgggttcttctccggtctcccggtacttcttctccgctacccttgcctctcaacgcttatcgcccatcccactccgtatggccttcgactgaggctgaacagttgaactctcaactacaccccatggcttgcggcgcttcttcaatgacggcgcagtctcctgaagcagaggcatttgcctctgccactgcgacccccgatgagaataccggtatgctccgtgatcggcgcagacattcgttccatgcttctagaaaactctcgtgcgactatcaagatgcagatgcagtatttatcagggtatgtacatgcattaccagtggaaaatatacccgggaaatagtgtgtctaatcaactcctaggtcgaactcttcttatccgaactggaacgtcggatgcactggatcgagcaataccggaaatcccacatggtgcaagtcgatgccagtctgaaacgaggctatgctacgctggaagccgtgagagatcaatgctctctcgcctcgggagagttgatgggaagtggcaaaaagcgggccaagattctggttgaaaccctcgaggatggatacaatgaagccctggtgaccaaggagactctggaacaaaaggcgcaagccggtgtgcggttaatggagtcattcttggtcgaacttgagagcaaagtgcatgcggttcgcgatcgcggcatctacggaactatagatgacgggtggaaagcggtcgattcgggcttggttcacgcccgagaaatcgttgacgagggtatggagcgtgcccgccatgctcgtgatactctgcgagatactattgaggaagctatccggctagccaaggagaagcgattgatcaactacgatgaactacctcacccatggcgcgtcaacccgcacatcctcaatggctaccgattcaccacttccaaggtagaatgtgtctcgtcgattttcgccttctcgaatgaaatgttcaacatctggtcccatgtgatcggcctcatcatcgtcctagccatcgccttttacttctacccgcttcacaccaatttccacttgagctccaaatccgacgtcacaatcgctgccgtcttcttctttgctgcatgtaaatgtctagtctgcagcactatttggcatactatgaacagcattgcttcgcaaccattgatggaacgattcgcttgtgtggactacactggaatctctatgctcgtcgctgcctcgattgtgacgaccgagtacactgctttctattgcgagcccttctcccggtgggtatacattctgcttaccatgtcattcggcatcggtggcatcattctaccttggcacccaaccttcaaccgccacgatatggcatgggcccgcgtaggattctacgtgacccttgcactcactggtttctcgcccatagcgcagcttatttatacccgtggcttctcatggaccatgtatttctatgcaccagtcatgaagagcatcatggtgtattttatcggtgcctgtgtctacgcttccaaagttcctgagcgctggaagccaggtcttttcgattatgtcggtggcagccacaatatctggcacctggctgtcctgggtgggattttcttccactatcacgccatgcaggacttgttcgcgggggccttccaacgagccctgggcgagtgtccgaacatgacgatgtgaagttacgtccaaccaacctttgcattgtccattgctctttgccttttgctcatggacaaatatcatgtggtacgtggtttcgcttttcaacatacagcgattgaacgtttagcaacgtttaggctcacagtttgctacgggtcacgacttgatatggccctttgcaatgaaaaattttatctcttttacgagagttgtcaccgttgatgcccattttgcctgcatggatggtgtttgtcttgattttctactcttcttcttagagccttggattgtacataactccgatgtctctccctttcgcaccattcggtctgtctagatacagggtgtgcacaaagatttttgcttttttgcgtgtacttttgagattcttgctgcacttaggaatctacatattgtagactccctttgtcaatatctgtagaacgaacaaagactgatttcgatatattctatgtttcctttcgtaaattacgtatctctatcatcagccatgggtttcaaagttgttcttccgaatcctataaagcattaatcctctcggtatattgttttatgtggaatagagagttatcttcctatatcggaaccttgatggttctctatatggtaggccttgttcctggactgtacttgcaaattaaattccatgctctaatgtatgtgtcgtatattcataactccatcatgaagccattgccctatatacatagcaacccaagccatttcctcgcggcctttcgaggtgttgtatcagcttttcgcactggaaatgcgccaacagtttggtgtttatctcgacgccatgggtttgagatacaccagaaagcacggggttgagtccacgcatggccaaaatcacgagatcaagattggacggtgggaaagaccatcacaattattgtgacctgtacttgtcggtagacgatgaatttcctgtctttgaggaggctttggtgaatatttatagccatctgaaatgaccatcgcagaattggtgattcagatttattgagtgttctcggtgacagccttagcctcagactcagctccaccgcgctttcggaagttgccctgcatccagcagcggtacatcttttgtttggtcccacggttgacaattagtcgccgatcagcccccatgttaaggacctcaaacgctccgctgtcctttgccagttgtttggcctctgcagacagctcctctgcgggctgaggatctttcttttcctcggatgcttcttcggtggggttctcatcaccaataggaatctgcaatccgctttctgcgctccaggtactccacatgtcgatgagctggtccttatcgaagaagtaaacacgtgtgccatcacctcggatgtagaaattctcggccatgtatcgacccttcttgaatcgcacttgggcgaggtcaccacggccgtagtcgcgaaacaacacacggccaccgggcttcaggagacggtagatattgcggatagcctggtcccactggttaggggccagggcggagaagatgaagattagaatcacaacgtcgactgagccttcggtcagaccgggcggaagagagtcgccgttctcgtcaggcacagcggttgcgtcccagacatcagcggacatgtatttctcattgtagagctcgctctcgcgcatgaccttcacggcatacttggaataatcacaggcatggactctcagatgctcattctcattgttggccagcaatgggaaggcggtatttccggctcctgcaccaacctccagcacaacctggtgacccgcgtccttttgtgtcacatcagcgagaatggggaattcttggcgcagccactttctatccttgaagaagttggctgtgttgttcttatagaaaaggtcccaccacttggcggggtcttggttgaaccgattgcgatcaaagtccgacacacgtgtttcgcgctgtctcgcatattgggtctcggcgaaagccttaaactcatcgtctggctcgacgtgatcccaagcattgaactcaaaaacatcatcgcccttttcaaggtatcttgagccgaattggaaggggtcggtccgtttcaggttgttgctgggatcgtgggaacgatgaggatcgacctgaggaggctcgacattttgtgtcacctcttggatactgggatcgacggtcatgacgttggttgagccttgtagtagttctgattgactcgagatttggaattcgggaaaagaatataatcactcaagcgatggtcgagaaggcggggagaacaaaaaatttccaggcggcgacgcgattggcggggtgcttggatcacatgactggattttgcccaaatattttcttgtccctcgacccacatgactgttcaaccaatcatatgctctctattgatacaccgcctcatttatttttgggtacgtcggatcttatcgcctatcgcttatcggtcttttacttccgtggacgacataagatgctttactgaggatcaatacgtctcatatgtgctagaagctcgaatatcattatgctgatataagcgctcaaagattgtgatggctagctaccacttaggctagtaatgcagaaaaatacttgatgtatgagactgattgtttaagcagatatctttcttagcttgatgtttttttgtcaactcctaattgacttcgttgagtctcatttgatttggctagcttctcctggggcaagtatgtttcagagccaatggacgctcgatagtatctcggaaatagttgcagcttgcatatcacaattcaccgatgctagccggtgcaacctagcgaaacctagcattgtttgacttaccatgtttggctctatggtattattatgagaggtccacgttttcttacattatgagccaacccttcattgaaacagctggagatgcttttgatatccattgactgcctcaggcacctatactctcttatcagctaatcagagttcctgggaatctggatgcctgcgggtgcctcgtccggtcagctttctggcctttctttcacccctcatttcctgcctttctttctgtttgagcatgattttctagattcatatttgattcatattcttcctgtttgccggttcaggtctggggcttatcgacgcaagtggggttcagcccactatcggcgtttgaggctcaacagtcgaactgctcatacgatagttcttgtccggcgttttttgctacagaactcacgggccaactttctctcgctatagtcaaatcaatattggctttgacacagtcaattagaaaacagtctctcattgagtcatgtatttcctctcggcactctgcgggtgcttcactcgagacgagaatctctcgcagccccatccctcttcggaggtggtcgccaaaagactcagccccaacggcatccagacaggacgctttacactctccgctgaaggcgaatttatccgcccagcgtccccagcaccgccagccgggagccatgggcacgggcccccgccttctgactcgcaggatggaggctattctagcgtggtccctctcccgcagtactcagcccgtccaatgagcctccacgagaagactttggaagcccatatgcgtgatccatctatttcctccgagtctcagaacttctgccccaacgatgaaaagaacgatcattacgatggagatctcacctccgatagttcatcagccgtttcctttcccagcagctacggcaatacctccaccgcaacgagggatactccaccaccgccatactctccccgtcaatccgtagtgctgagtcgctcgcggtccatgtccatctcgtctactatggcggtcatcattaatccacctcccgctgcccgcatgagcggttcgcggactggacctacatactctgaggaggatgatcagtcccttcgtcgtcatcggcgggtctcttgggagagccgatgatagactcgtttaatacattctgaaagaacgtttgcttgctgccctttgcttattagctacctgcttaatattttccacatcgctcttttggtctaggcgatctggaatcgtggcctgtgatcgtttgggatcttccattgtcgatttacatttattttgcacgactgctgcattgttttctttctctgcttatcatttttctttggtactgttctattgcacatgacgcgacgacatcatttatatggtatgactgggactggacttggtgcaaaaagggatttcttctgggatagccttggatatttaatattgatctgcacatactcgcttgtcatagatgcaggaggacaccgtatcgagatactcggttaccggtactcactcacatccagacatagtgtaacaattatgataaaccgaataaattatactatatttcgtcaatcaaatgttccacatctagcttgattactactatcctcgatagaacaccaaccaacaaaaagggtatcaatgcaaatccaagatataaaccaatttcactcaaaccaaatcaatccaactcaaaaaccccagcccgttcctgctcatgtctaagtaaatacccacaacacgacgccggaaactctaacaacctcaaaaccaacggatcacaactatcctccagaaacatacagatagccgtacactccgaacgaaccctcatctcaacccaccactcctcaacataacacataagccccaaccaccaagccaacaaaaccagcgccggcgcctccttcctaagcaaacacccatagaacggattctccaacctccccatccaagtattataaaccttaaaactctccgtagtcctctcaaacggcaacaaccccatcagcatccgcaaaggccacaaacacggattctcctcgacggtcgtctcctccgcaatcccacaaagatccgccaaatccggatcaagacccacacgcccgggacgcttatcctcgaagtccagcgatgcatcccgcgactccatgaataccgtccaccacatgctctgcgggagccagtggcccgtgcgctcgaggaggtagcgcatgccggcttggattcggagccaggttagtgcggttgggtctgttgtgaagacgaaggaggtgcgtgggttgaaggtttcttggtggaaggagtgcatgctgactatcatgcaggtggagtagagcttatccatgttggcgcgggttatggttttcgagacttcggtcgagtattggttgattgtttgttgccagtggtaggcttctgctaggcggtagtctttgttgtctggaaggagggtgcagaggtgggttgttgcggctgctattatggcgtgcatgaggaagggggtctgggttggttggtggttagtttgggagttttattaggtagattatagctgtgttttgttgaggtatggcttttagataaactatggatggacttacttcgaaggcaagttggaccattttgcccattacgattcgaacgggtgtttggctttcggttgcaaaggctggggctttgtggaaatgatgcaatgcttccaagatgcgggttgattctgtggcatctgtgagtgctctcggcagcttgataccggtagcagagggcggttgcagtaattcattcaatttgtccgcgaccatcattagagacattgaagaggctagagaatcaatcgagatcaagtcggagttggtcttgataaactgggaaacgatattattggtcttctgaggttgaggtcgggctggctggcccgagtagtcacactcgctgccatgtttttggcaccggagacaacgtggttttgcttcatcgcacttgatcggtcattatcagcagacggttgataatgggggcgtccgaagtaccttgactcttcgttgcttacagttcacacagccggcgcgggattttcgatgagacctgcgggaatgatagaccggttcagatggttcggacccgcacgctagagaatcctttgatttgtagtttgggattcgaaagaccatattctgcccctgcatgtgtctagacgagcgtggccggggcaggggtttagattgcgtgtcgtccatcgtttctcaaagtataatttgacacggggaatatttgccgacggtctattaaatccgaagtacatagaagactatacgaacaagctggtcttaggcgtgcggggagtgtgtccgtagcctttctcatcgagatatggttacgatatagctctgcgcctgagatgtcagactggtgcaaggcgactagtgaagctcaagtctgtagaactgcgccttgttctaatcagcctggccacttcatgtgtccaaatagaagagaaactaggtggtgacggagaatacgaggaggcgaaggagaagactagaacggacgctatccccgattaggcaattctcgtattcgcagaaacaatgagaagttgaccagaaactgaataaaagacatctacttttaggaatatattgaagctatgaagacctggaattggattcgagaaacgccatgcaattcatcactcatcgaagatcatccaagggggtttaacccatcttggcattagagaaatccatctctgcaagcaggttagcaacatattgaaacgaaagaacatcgcagaaattcgagagattgaaaaggaaacaacgtaccgggatgctcagcctggaacttcttcagcaaatccatcttccgctgctcgtcactgctgggaccacccatctctttctgtcgctgatcatacatcatcttctcgaccatggcgcgagtctcgccatccagatcgcccagactggagttctcgggcgtaatcttggtgacatcgattttgggagcagtagtcacaacatgaggccaccattcgaccttgttcaccttatcgagatggatgctgatttccttgccggggaaggtgggggtagtctcgagggtccaagaggattcgtcgacgcggatggcgtgggggaagtcaccctgaacagaaaaatgggggtaattagctgactgatttttgggttggaatgtgttgatttagagtgtatggtgtaattctccgggggtggggaacagtggacatacctcgatgaggggttcttgtcccttgattgcgacgcggagtttgttcttggtcaacagcacatccaggtcgcggcccttgaaattggcaggaatcggtgctgtcacatccacatcacgaatcgtctgtgtccacttgtaagggagctgggcctgttccgcatcctcgcgggctttgcgctctttgttctcgcgttcacgttcggctaggtcggcgggggaggggttttggtcgagatcggcagacatgatggcaggtcagaaaaagcaaagatagagtaaggggggctttttgatagacggtgtaacggtgtacaaggtaggcacggagtatacggagtaataattcgtgttcaggtgaggatggaggagcaaaagcccaaaaaggaaagatgtggagacacttggcttttttccccgttggcgcttttgccgccagccctaatcgcctatgacttttgcgcaataccttctacaatgcacttgtactcggggatcttggaatttgtttgactgcataatctgaaactggagtacttgtcaagtgtcctttgtccggtttccgtattcaacatctcagggcgcggtcatttgagccgggattgcgatggtgctctccagaatgatattatactccggagcagggaacgcatatgacatcagcgatcgataaaccgcagtagcgtattccgctacgagcactaatcaagtcagaccggttgactccacaccactgtgatatgcataccggaaaagcgcgcagcagggcgtaatgtcacaataaaccacaagggtaatgtaaagaaaaagacttgaggccccagcgggaagatggcgttgaccaaccggtcgttcagacggacatggtggcgcagccagcccaggtgaaaagtgatgaacgcaagcagtgccccgagaagcacaccgcttagaatcacggtggcattgtgcgcgacgacatcgaggggtctagggtccgttaggaaatgtctcctgcctctttgggaccaccgacaagcatggcttacaaggaagggtgggcgacttgatcgttagcggcagccatgacatgcatcggctgaaaagggatctgagggtgattggcaatgcagtggacaaagtatatgtcgaacaaaccaataaaccccagagaggcaagtgccacccccacttgaggctctctctttccttatttaatttattttacatcgcatggagttgtgtcagtggagaaatataaggaaagtgtgttctcctgcatgttgccttgtagattgccttccaagttgtaaagcgaatgaccgaagcttcaaggtatagaatgtacccaaaaaaaaaaacacgctctgatcccatccatgctctcatcatccgtagagaaaaaaagaagaagcaaacaaaaaaaagcacacgaaaaagcaaacaccagaagctcggttcccaataaatcccacagcttcaacggcgctggcgctggtcgtcatcatcatcatcattattcttgttatttgccatcctcgctagctcgttctctatgctagctgtcagtttccctcttctacatccatgtcagaaaagaaacgtacctcgaatctggtcgatttgccttgcggtgtcttgaagcatctggtcccatttcatctggtactcttccacgattgttcgcttgtatctgttctgtggctcctccttgggctcctccttgggtgtctcgattttgtccatggtggatatgaaagtgttcgagaatgaagtaggtatagttctcagggggctcaagaaggtggaagtgggtggattaaagtcaaatcgacgtgcgacaggaacggctttatataaacgacacgcagaattaaaatcaattaaaaatcaataataaatcgtcgacactagaaccctgttcttaatttcccaaagagaaaaaaacaaaacccaaaaatccctgtcaaataatgttggcttcggaaatagaccggtcacgcgtctaaaggtcaaggaacgcgttcaccgacatcttcccttttggagcctaaattgaaaacgggccatcggtccgcttagcctgtcttagggaagagctgaattggcggttgctgattggcgagatcagtttgtgacgggtttttttttatttttaccccttgagcaaaagtaccgtttcagaaagtgactggactggggatgatgtcagaccataacgggacctagcatagtacattctgtacaacagttgtactccatacctgatcattccaaatctgccttgtcggtacgactaataggatggcttccagcgtaccgaagttgtcccgcacccaatcgggggctgaggaaccacatccgcgccaaccgatcggatatcttgggtcgcttttaaggggtgggaaagggtcgatacgtatcatatcgaagaagaatcacaattttaaagaataaaaaatataaatatataaatatataaataaaaaggggcaccggggaagcgggtagaactggattccctcccagtgatcgcccgatccacccgaagttgatacttctgcgatctataacggagtacggagtactccgtactctatggatatactccactactttcacaacgggcaacaaaaaaacacatatagatcttggcgcccaacaccttcggccctgaagttcagccctgatgtccaacccggagtccaacttggagtccaactcggagtccaacccgggagccaaccctccaaccctggaaggctagaaggccgaaagggctggctgaatcacacggaccgctcgaaaaccctgtaccactgtagtatgtacaaggtagagcccaacactacccgggatcctgcatggctcgattggcccaaatagcgtttacaccgccgatagccccgggacgtgcagagccgtagacgttgcatctcgacaatccacgtggtttgcatacgctagcgctgtgtcatggccgttgtccttgaccgcatccctctatccatctacggcccgacacgttctgaaacgctaagatgcttctggtgcttttgtcaagggcatctcagcacagtcagatgaaaccgcagttgggatgtttgatcggggctatgcttgttcattccagctgacggaagatgatggtttaatgggcttgattacattccgctatctgaacggagttggtcttgcctgtgcattattactggctgtgattatagtttgtccagggtatcaaaccttagactcaagggttcaatatccaacacaagggagatacggtcattggtctaaggctacaaggatgaaaagataaagagcaagcggtaaaataatacctgatcctttaagatatgcctctacatggtcaaattccacattcattccccatgcaggtcggcaaatgaaagtaaaaataacaaataaatcgtaaattctggcgttggtgcctgcatccattggccagttatgtcaacgcagccctttccgaggaaccgcccatcgacagcctcagcccggtttgaagagggggtggcagaagcacgtatgcgcaatgcgcccatattcacatggtacaacgccgggttaagacatgatattgatcccgctgggatagattgcttagaaaatatttcataagagtagatagactcccatatgacgccagtatatgagatcgctgaaaaaaccgagagaaaggaaacaggaaaaaaaaaaggaaaaacaaacttaggatgagaaccatgaaagtccgaaagtccgaaacggagacggtgagcagcgcctcggactaattcgagtctgggaggaaccagtcaaggtcatcagactcgaaatgcgaggcggatgtttccggtactgcaatgccaccttcgaaaggatcgacaatcccgtcatcaaaagggaccgttgtctccgtctccgaaggcagactgctgcgccgctcgacgaggtcaaagaactcacctgcaaactcagctagctcattagccactttgagctccaggatagcttcaagcacttgcatttcctttttccatttgcgatcacgctgcgccttttcctcctggcgacggcggcacaggctgtcacgagggaggtccgccacgcagttgggacacaagtaagtttcctcgcaatacgagcatttgcagggggaatgagtgtatatgcagtccgcgcatacatacaccctgcagcctttgcattcgcgcagatagctagagcacctaggacgtggatccctgataccgcctcggacatccctgattccggttataggatcagccggggggcagaaaaaggattggcaaccttgccatcgtggttcgaatagcggcgaatcaaagaaggtggaggatgaggatgagggaggggaagaatggtcagatgcaggggccgaaaatgagcgagttggttggttggagaagaaggaaacaggagccgactgatcaccaacatgtgattcgggtgtattttcctcgtccatactatcctggcgtgaatcgtcaatgtagcttttgttggtcgagtcaagaagctcctggcttctgaatagtaggtcgtattcgggaatttgactagaaataagagatcccgaaagatttccagcccaccgattttgaatgatttgcttttccgtctcaaggtctcggtagccgcaaatccttaggcgaagcccgcggaggtcatgctcaatacagagaggccttgagcagctcttgcagtgcaccttccactgtggtgaatcgtaacatccttgacacaagttacgcggacacggtgagacttcccggttaggtggtcctaggagccatttcatcatcgccagatgacccgtttcaagcgagtagtccggcttgctcggatccccatatgcatacttggggaacgtcttgctccattcactaacggtgtactctagatcttcccaaccttggccacgaggcaaaggcacggctcgtacttggtccacctcaccattgcgaggtccgatgctaatcccaccgcccccagagaggtcaggcttggtgcagcaccaatggaaattgaggataggtggtgggtccaatcctgtaccatggggttgatggggatcggtcagaatatccacgggatcctgcattgagcctggagagtgtgtggcccctggtgcccaccagaaggaacccggtgcgttctgggctttttcagacgaagatgttgtgcttctgtgaagatacggccgttcgtgggcacagcttgcgcagagtgttttacggcatccgacacagtgcatcaggacgctgcaatgttcacatcgctctgagatatcctcgaggcagttgtcacagcggatcttgtcgacaaattgggtatgactccggcgcatatgggcaggcgtcattttgccttcaccccagtcgataccctcgccagttcctaatgcctcgccataaaatccagtgtcgcgattctcccacagctttccatcgtatacgtgtggctgagaagactccgtttcggttgggccgatccaatttttggatctccagagtcgatcaaagaccacccaaacttccggcgaccctgctccatgcgggaacctcgatttgacataaccggctctacgagcgcatctaccggcaggtgtggtgcaccaagcggtatcagtccaaatgcctagcttgtggcagatattgacaagttcatgggtcgactccgcgtcagcgtccttccgcatcagtgaggatgatagataagggcgtcttctatggtgacgacagcgataggcgtagatactcttgagagcaagctgttgcatcccgggagagctgccggtgttattctccatgtccatgtcacactgcagcgcgaacatggtcaagaaaggaacgatgtgatatttcaaagacacattcttgcagccccgaacagagagatgtaccagcgtctctcgacgtgaatgcaacacggttgaggtcaggttctcccccgaaatggccgtgttatccagttctaggcttttcaaacacctactgaatgggataaccacattcatcaggaacatgtctagcgcgtaaggcctggattgacgcgcgggcgctgtctcaaggccgcttgggtcattgatttgaggatttggcagagtgcttgaaggaaattgtaggcgaaacgagagtgacttccatgcggtcggatatgatcgaaggaacgtacggaggtaatttgaagtgtgatacagctttatgatggtatcggtcgggatctgaagtaataaagactcgaatataggtgcatttgttgttatcactcgctcaaaggtggacagggtccgttcttctgggataacagagtgttgtaaggcattttccagcaccgtcgggtgcgacgctggatcctcagcagcagcattccccctagccatagtgtcgagatcgtgattcgtcatatgttctgggtgaacaaaagatgccacttcttaggtcgaagatcgaaatggcgcgaggtcgcgagctcggcggttagagacgcggcacatgataagacaacttgaagatgcaatcgaggggggaagcacaccctgaggtaagccaccatgcaaggccattaaaggtaaagagtcgataattgaaaagatcaggtagcaagggctgacgaattggggtatctgaagggggacggagaaagggaggggtataaaaggaggggaacagacgaaatccccaaagagaggggaaagcaaagaaagagagaatgattacttatgcccctatgacgctgaatcaatgaaaggaagcaaaggcgtaggaaaacaagtgcaaagggtgagcgacacaaggtgatatccggatgcgcccgttaggagagaccagcgtcatgtgatagccatcaaaccccggattttcagtcgttcatagattttgttatgcataggaaatacgatgcactgatcgctgagtctattgcaaatggtttctatgctaggccatgtggactaatgtttgtcggtcgcatcgcctacagtgtagcccctcgcaatacccttgcgcccttccttgactagggtactatcatccaagtcttcctcatcatatcgaatatcaaagtcgctacccagacccttccatgtccgttgagatcgcaagtattcagcccctggtgaaaaggcaccgccgatcatagccaagtcacccttagctcgtcgcgccagtgccctagcagcggatggcccgctggtggatgatccatcaacttgagaagcgcgaggcgcgggatcccgcattgggcgggattgtgagacgtatcgaccggtccgaaagtcaaactcaggcggcaccgactcgggttctgacatgtcgtcctcatcggacatggttgtgccagtggatgtctcctggtcatctccatttccgttgacctcctgggctggtgcgtcgaggactgcctggaagtcactctgccacgctcctgtccatacccggtctgagtcatttttcaaggccagctctaattcgaagggagtgatgactggcttccagaaatccttgctatccaccaaagagctttcccagcagccaatgaccacccaaccaccgatttcactgaaattggctaccttggcagcattcaatttgccaaccacgaacatatagctcttcttgcctgctttggcaattcgttccttgacatgttccacaatatgcaggtagttcttgacactcaaagtgttgataagaataccccagataggcacggttgtcagagaggcaagagtgccatagcggcgtcgcaaaaccgcagtagttgaagcaggcaatggcttaacgttctcatttgaaaggtcgttggtaggataaatatggattgctgcaacgcgagacgcgagcgtcatcatgagggctgttggcggatcagatatgtgaaacagttgccagtcggccagtgtctcgggcgcctctcgaaccgactcgggaactgtgcgattgggaatcgatgatgaaggttcatgaacaacttccgttgcatatatattgctatatccctcttccaccaggcgagcgtataccgtaggaacgtggtctgcaaaggtaacgtcggccgcgatgataaccttggtcgttggatcaagataagttgccttgaacgctcgtatcactggttcaaggggcagatccttatgtgtgaagacatggatcacgggtagacgagctgttggcgacagacaggacctcccgtaatgtacaaccacatctgcgtccacatgttccgcggccacttcgtcaacgcagcaggtcccgtaggatgtatcggccaaaattgtcaaccgaggagagtgttgttccgttttatcctccacctggagctccgttatcgagtgagcaaggtcggtatcggcgttgctagggtcggtttggttcgagggctgtgtgccattggtgccgacttcttcgcgttccaggccccggctgagcaattgaaatactcgcggagcatcaggaagcatatcatctgggaactggagcgcaatgcgcttgtaccgcgcttgccgaatatccttcaatgtgcgctcgatatcgtaggtaatggaaagttcatcgtctgacactggagccgttgggtctcgcgtcgccactagattgatttcttcgagaatacgatcatcagcagtcgacagcacaggggctgacttcatttcagaccccatttttgtaagatagagggaggaagcgtggtagtgaatcaaaaacgacgaaaaattgcaaaagttttggagaaaaaaaaaagatccccccaccaccccgccaatggataacggtaaaatacaatagagcccattggcagacagcagaccaactgcctagagagcgaattttggtgcaaacataatcaaattattcccgaactacagagctatttacgcatttcagcatttcgacataaaaaggcaaaggatatctacaagtccgcccgtgctggctctcccgcccaaaccctgcgaagcaactcgcggatcggcgcgcgttcaatcgggcgaggattttagtaagtattggatagcgcaatatcagccgtattattgaggtctccttccttaatcccgtaatccttcacgccacgcgtgtgggaaagattggaaggacatgcctacgctgcaaagccaggcaccatacaatgccttggatcgtgcaaattgagaagatgggttttcaataatcttggggagagaggatgcaagtgtccgtatgccctcgagcgccatgttgatgattgggttggtgttgcgcgcgtagaaagcctcggccattcaggaacatattagattcgtgcataggaagctggtgcagattaatcaagtcgcaatggcgttaacaccgctagtggcactaataggcaccggcaagctcattgtgagctctatattatagatgaccgtgccgggcaagttcctgggctccgactaagtcttcttcaatccattggcagtctcacttagaatcggagccatttcgctaccagtatatgcagtcggattgcaaatatgcggtagtccagtgcgaatgctgatcgccttccgaagaccaatagtgctttcgcctccaatggaaatgaccgaatctgctccctggtccttcgcatatccaggagccttgtgacattcatgagagtatgcatagtcgcacccgctaaagatacccgtgatctggcccttgagcaactcattcgctttttcggcctgaccgatctgcaagggtgtcgagagcaccagcggggccttcacttctggccgggagatctcatcggcaaatttttgcagcgtgtcgctgccgaagacggacagggtaggaattgtactcgaaggtatccattttgtgtttgcaattatctgaggggacacttgccatcttatagtccgtacccccccggcattcaagcctgtggggttttacgagaagtcgtaatctgggattatccgagcgatgcaatggcgaattttgcggttaatattaaatggccggtttgaattgtttgggtacgctcggttcttgcgtagctacgggtattccgatcatagtgaacatactatggacgttcgatccacaggtggattttgtgcctagatataaatttcccaaagtagcgggtggggttttgctgcatgagtcccaaagtcgcttttatgagactcagactcaggcttggattccagtacaggctcggactccgtgtaatccattgtattgattgacggaaaacttgaatgggtgatgggtgatttatagtgatacataggcaaactaagactagcgaagcccctctcctgtagtggtaaatcggatcaagttatctatgggatattcaaactatcctggctcaatgcgctctaaactattttatcgccggcaaaaagtcgatgagcggagcggcaaggatattctcgcggcggaaagcgaaagcactcgagctcatgccccaacggagtgacaacaactagattgttgaaggcagaggatctgcagatgtcagtatgtaattttcgttctatggatcacttcgggtcggccctcaagtacccacaagccgcaaccttggaagtttcggttcctattcgatcacattgatatcaccgttgagactcgaactaatcaacatacgtgtaaggaaggtaactgagacatagtaattcggagctcagaggtacagcgaaatttaacaatgcatattcaattttcggcttctcatactgtattattagtctctattatagattctcaaactaaaacacacacatgaggcagatacacggactacagtagtggctgttcaatcttgagttccgcttaaggagctcattatcttcaaatgcctctcattcttaatagaacgttgtctatatgtctgaagcatcccactcacgtgatagggtcgtccaaatgtgtccatcagccccggtagatcttcctctccactctccactcttctcctctcgcatctgtgcacttctatggttcccaagtgaatgaaattgaattttccttttctgatattctttgtgcctttcatagaaaaatcaaacatacaatacatctcccgaggtcaaaatcaacaaagtctatatgagtggacacaaggaccccgaagacaccagtgagcattgaccaccaggctgtacaccgaattgatctctaacctcagattctatttaactcagaatttcattattgaggaatgaagactacaatcaattgagagacccagacgattttgcatattacctgtcgcaatttcagcgttgccaacatccaccaatcctgcaaatggacaaaatagagatgcaaaccgatagcgggccaaatcttctcgcgaagcgcatggcttgtgaagagatggatatctctcctggtaccaaaagagctaagggctttcatgatgggctgacagaggtggttatagctccagctataacccggatagttcctttccccgagaaggtatgctaggaccttgaaatgccaatcaacattctaactgttctgaagcctgcagttttggaagaacgaaatggcgagatcgagctacgagttgtcaacaatgatggctctagagagagcacgattatccttacaggtcttaaatgcctatttcaaaagcaacttccggaaatgcccaaggattacatcgcacgtctcgtctacgatcgtgctcatttatcgattgctatcgttaagaaacctctagaagtcattgccggtatatcatttcgggaattccgagaacgcaagtttgccgaaattgttttttgtgcagtctcatctgatcagcaggtgaaaggatacggagcacatcttatggcccatttaaaggactacgtcagagctacttccccggtgatgcattttctgacctatgccgataatcaggccattgggtattttcaaaagcaaggctttactaaagagctcactctcgagaattctatctggatgggctgtattaaggattacgaaggcggaacacttatgcaatgctctatgcttcctcgaatacggtatctcgaagttggtcgaatgcttttgaaacaaaaagaatccgttctagccaaaatacgtacctcgagcaaaaatcatatcattcatcaaccgcctatgcaatgggctaacggcgtggttcccattgatccactctctatccctgccatccgggcaactggctggtctccggagatggacgagttagcacgacaatcatgccacggatctcgtttccgcggaccccatttcaacgaatttcgtcgttttattaacgatatccaaaaccacaaacaagcatggcccttccgcaatccagtcaacaaagaccaagtccctgattattacaatgtcattttatcaccaatggatctatcaaccatcgaagagagattagagcattacactactccgaaggaccttctcgccgatctcaagttgattttcagtaactgtcggcagtacaatgatgccacaacggtgtacgccaagtgtgcggtcaaactggagaaatacatgtggaaactgatcagggagattcctgagtggtctgacttgattgaagaatgattgctgctagtgcattctttggggtcagctgtgcgagggttttgtatggtgggagtcgatatcggatttgagaagctacacggagcaaggtatcaatgattcgatatttcttgcgatttttagcccctaacgcccctaacgcttagttgacgttcccgtggacatcagaataaactagagccaagtaagggggagacatatgtatgtacatatcggagatatagatattcttcctctaattggcccttaaaacccctaacaccaacgctatgtacactttttcttgttttcgggctgaacaatcgatttgcagatgtgggtatcagagaatgggatattgagacattagtccaagtcatggaacgccatgacatgctgtccaccagtgcggtccttgcccttagacttcttgcgcttctttcggtcctttggatcctcgcgacgttccgcatcgctgttatccgaatccttgtcgtcatcactatcatccatgtcttcgtcgccagatccttcaatattttcctcagcctcgtgccacaccttgacggtttggccaccaccagagaccatccggccctccacgtcaaagcccaagcctacaacaccatcgatctcatcgtgcacaacctcggaaacgacttggttcggtccaatgcgcacaaatttcacttttccgtttgagaggcctgcggccacaaccttgcccaagtagtcaggcccaactgccattgtctcgatggaatctccgccatcggcattgcggtcgacgtagatccgctcatcctggtcatcccacgcgcccttctcccagagagtgaggataccgctggctccaccaacaatcaacttctcgcctctactggttccgctggagggcagaccacccatgaagatcgagctgaccagttcttcttcctggttctcgctgcgcaccagaacgccccttcggagatctgtcacggccaaggttgttccaccggttgtaacccactgcttgctaaagcccgatgtgctagtttcggaagccggcagaggagtaagagaggagatgtagtcgtcatgggggtggtgcgtttgttcaggtcgcgcggacaccttagagtaggggatacggagatcgtagagatgcagagcgctcgagtcggtaccgaggaggagggtttgaggagagagggcgtgaatcatggttggcgcatcaatggagctatacgacatcaaaaaaaacgagaggtcagccaaatgcaaaggtctggatcgcaacgtttgatattcgggagagttcctttacccgttcttctcaaaaggaatcacaatcttgttttgcacctggccagtctcactgattgcagctttcaccataccgtctgtaccagccgagtagagcatcttgccatccgtactgaaccctagggtgcgacagctacccttgtgtcgccgagttctccacattgtgtcaatgtggccctttccggtccgggccaacgaactcggtgcggcatcttcgtcaccctctccttctaaggaaggcagtcggaaggtctggacgtggcccgaggctaaaccgacagagactacgggctcctcggggtggatagcctgagcgaacaggtccgaagaaagcggaagcgtgcagaccgtgtcgaacatggttgcgaaatgcgacgggggtgagcacgaaatacgaaggcttctagcgagcctactaaatttttgaattcgagtgaattgaatcaagagaatcaatcgcaaaaagctgtagcttcagagctggccgtttttttctgccgggccgagaataccccgaccgccttcttacttgttcagttcaaatgagcctcgattctgacaaacagctctgattgtaagaaagataaatgaaaccaagaatacagacaactatcaacgaaagagatttatacacagttcaccattctcttccaaatttggtatttccaccactggctcaaggatatatgcagcacggagaccccgcattccattccaagtatagccgaattcagcaagtgaatgtcatttcgactctctaggaagaagcgtaggtggagccaatggggccgaccttgatgttagagtaggtcaccttggccgagcccgactcggcctcaacggttgctgggtcgccggaagtggtggcgcatgtgccgcgagcagcaccgggatcggaggcagatgcatcagtggggtagacctccccatccaaccagagcatgttagcatagtggtcatcccacaggctcatgacaaggaccattccctggtccaacccctcgcccatggtagccagaccaccgtgctgggcgaagatatcctcatcgccgaaggctttcttctgggctgtgcagaagtcggtggtgatcgagtttccggtgacaccgctaacatccgaggctgagttggcgatgacttttccgtcctggacgtagatgcgcttgatctcgctgagggtgccggtgtcggtgccgtcgctggtgatgaactgagtgaccacggttatcttggacttagtgtcaacagtcatgccgggaccgaagaaggtctcatttcccatgcggaaggagttaaagtcacatccatcgggatcgcaggttcctgcgtagcgggtggaagagtaagttccgccacaatcatcgccctcgcacatagtctgttcagggctgtcgcaagggtgaggcgtgtaagcagtggaaatgctattggcttcccagatatccatctcagggcagcaagatccatggccgccaacaccagcgttcttgtcgttctcggaaggcacccagccgtccacgttggcctgtatcgcgcatcagtcactttgcccgcaaaccgttcgaattgaccagtataaaaactcacctggccgttgatgaacttcagatcacgagggcactgagaatcgcaatagccagttccgtacttggcacctgccttgttccccgtgtacttagccaggccaccatcggaatccatggagacaaagtacagagctccattgagtccgcagggcaacccggaagtatccacgtcgaatgtgaactcctggttcttcagcttgaatatctggtaggtactctcgtcctccatcaggtacagacgagagccaatgttggcgccagtgacgaagctcaaagtgagggcattgccatcagtggtcgcaccgtatgtgccggcgtagtcagcgccgtccaacgcacagttagtggcgcaagtctcgtcatcggggcagagagtcgcatcccactatcatcaaacaagtcaatcaatgtgaacgctcaccttctcggttgaggatctcttacctcgtttccagtgtagcagttggtgtaaccatcgacagagtgaagccaacgccagttggcatcaatgacaacagagccctgctggtcggtgcaactgcccgcggtagtgcacttttgccaggtcaaagagggatgggtctcagccgtcaatgtgccagcttgctgggcacgggctgcggccgccaggacggagaaaaggagtgcgcgttgatacattgacaattaagcagagaggtcggtttgcaatgtgtccttggtgtcttgttgtctggcctgctgctagtgaacacaaataatctcgggtgggaatcggccattatatgtcttttctccgtgcaggatttctctgggccgtgactaaagtcctttccatagcatgatcgattgacggaccgtgaggccgttaccaaattggtattgatagagagcccacaattatcaatgcagggtcaaattccatactaggtgacctccggcgttgtaggtacgttaatttgggactggaaccggcgcctgaatcaggaagggaatgatcatcactgggtgacgctttgttataggatgtctcaaaatcctgactaatatcggagtagataaacatgcatgttaatcgtttcaacacccgtgaagacggagtatgccccgatcatccagttctgtcgattgctgtggaagattcggggagcttaacagtacaaggatcaacacaaggatcaactgcaaatagagaccttttgaggtatttttcctatcgatctttcgtatacatcagggcgaggataccagacagggaatttggccataggattcaaatatgctccactccgcacagaacaaaaggccatgggacagttggtggcgttgaagggcgttaaagcatgccaagagcgcttttagatggaatgagcgctacttacatcaaaccttgaaaaggctctctttggtggcagataatgtggggtaatatagacgaaggcgttaggcccaaacacggaggatggcctgcagacccttcggatatgaagcgtttcagtccgaaactagattatatacccttgcagtaccagctgtccggagtaattatttgatactggactgttattatcctccaggttcataacgtctgctctattttttgatatagctgctttctttcaatgattctctagagagtcctcaactcgtcgtctctttgtaaacacatgaatctcaaaccgaggctctaaataaatctctgcataaatcatgaccactttcaagtttccttgggcatttctagtccggaataagataggctctagttatgcacaatagatccacagcgcgatggtctgatggtatatcacattggactaattgcccaactcgaagcatcggaagtaaagaggtacataagtagaaggacacatattaagtcttggctattactgtgtatcgcattgccggatccactaagttttgatttagaagtacggcaaagccgttgtttcagcctgtttcgccagttcacaattctaaacggtagcttgtaaacaagggtgcaatatgacctctgcaagtgattactggaagggatataattttaccgaacggaaagagcgcaggctgatcccccgtgttctagtaaggtacctggtgacaaccctataatccggtggctttaaaaatgtatctttgcctgttggtaatgtcatttagcttaactacccttgttaaccgattttacccggaaatctctaagaagttatattcaagggtacactgtcctgcagattcaaagcgcagatggccaaatccgaccaggaatttgccatcaatatacaagccaagtatttatgtgctccaatggagcccaaataaagtgcctcctccatgagtagacaaatctccccgggcggttatgtggctggagattcaccagccattgaacatggaatgaacaaggccttggacaggctcatgcgtagagatatataactagagcttcaaggatgactacatgtactatgtccatcatttcctgtcatgataagttccttcagggctgagttgaataagtctctaggctgaatactttcaaagacataggtagggtaggtatgtgaataggtagcatcaacgttatatcgatacagaggaaggattcctgctgccgatgcgaaaaacgagcaatattaggatactttctagccaatttcatgagtacctagtcatacccagcttctcacatgacgctattgaagttggttgatggaagggaacattctcaagatctatatgtagagaggagagaaaagaacgggatttattatgaaactgactagttagttatatcattgccactaactatatcataaagtgaatgaagcaaatagaaaaaaaaaagaaactccgatggggggattcgaacccccgttagtgctgtgaaagagcacagtgataacccctacactacatcggaatgttatacaaatttcagagatcgaggtatagttattccagcttttattgatatcaccctaggtattccggtgaaaaatcctataatttactacaatgtcaaaatccagaaaggagggacagcgtgcgcgtaatgggtatgaagacctcgtgtcacttatcagttatttgcataagaataacgatcctcaggcgcgcagaagaaaaattagatacaaaaaaaaaggcatgaaaaaaaagaagttctccgatggggggattcgaacccccgttagtgctgtgaaagagcacagtgataacccctacactacatcggaatgttatacaaatttcagagatcgaggtatagttattccagcttttattgatatcacccggagtgttgtacaattatattctaattatgtcttactagatatttcccaaaggtaggtagtagcaaactcctccaaaaagcagcacaaaagataccaaaaatagacataatgtcataaatcagatattgtagccgggattatatcgatagataagcattataaggtgatatagggcgcgtagggtgtcgcttatggagttgaaaaatgcgctagaatgaaaaggaaagcgtaaggttcaagagcactatccaaccagagttttatgccccggtggcatattgagcttattccgatcatctgaatttttagtatgaagatgcgaaaagccgttttcgcactagatgatgtctaagataaatgaaacatgtcaatcctacagagtccagatgaagtagaagacacacttttccattataggaagtactagtgaatctccagctcgtactgtcgacacaatagccgtgatattaaatgataattccacttcattgatggtaaaaccccgggagctcaaagaatatgcggcaattctcaacaaagacgtaaaaataggctgagccggactttactgagccataggcttctcatcatagtcctaatcatagtcctcatcatcctcctcgtcattgtcatcatagtcctcatcatcatcgtcctcataattgggctcctcgtcatcctcattgtcgtcctcatcatgatcgtcctcttcagcctcctgcgcggagttgtaccacggaacagcagcatcttcctggacctgagtcaattgtcgtgagccattcgttgcgacttgaagaccatgtctcatagtgtgttgaagactggcgattgtagaggtagaagcctgcatttaattaatagccacctaggggagcctcagtattgaagaccactcacatgtccacagctcggtacacaataatgaaagaccttgccatggcacacaacgatttgaccaatagagttctattcacgcaattagaaacattttccgaagttgattctccttcgtagagacttacggtcgtgtacggtgggagcttcagctccagggcctcggtcttgaagaggtgctctctgtacatattgcagctttgcaaagagagtggatagttataactatccagtaagagattagggggatgcattttgaagtctgcttcaatctcagaattcttttctgatgggagggaggatgaagagggaaacattgaggagaagagttgaaatgttctgcgcagctccttccttgccgactacaatctttccctttccacatcctctctttctctttctctttctctttccccttccccttctccttctccttctgcttcatcctccatctgttttcttttcttctttttgagactccatcttcaaacagcttgactctactcttgttgccccccaactttcccagccaacatgggcttcttgttcgcaagcccgagtgatgtgacgctcatcatcatcgaagagagcgagaacgacgaccaccaaaccaagacagccttatttcacgttgatcgttccaaattgattgagagcagtgattactttcagagaatgttctcatgtcggtgggaaacatccgggaatcacaagcccactctcagaggcgacacgatcaaaggcatggaggtgatattcgggtcgattcatggagtcgagatcgagccagagtttgtcactgttgcggatgtctggtacacaatcaagacctgcaacaagtacctgctggatcctaagaagctgatgggctggtttgcacgctggatcaaacatattgacgagaaacaacctgaaatatgggaagactatgatttcaaccgccagctactgttaccttgccatttctttgatcatgcagaggctttccagcatatcacaagaagactcgtctacaacgccccaggccatatcacagaaatggccccgacagactcaccatcattcgagccgatgcatatgcccgccatcgtcatacgtaagttgatccagtcacagttttaagatcaaaggacgctaactcgcagaaagagcaattaaacgcagctagagggcgtctccgaacggttctccaaagatcgctttttggagatttgaacatgactctcgataaagctcattgtggctgtgcagcagaaagcatgtttgcctactttagagaattacatcacatcagggtcaagccgctggatagtgacatatacaagaattgtgtcagtgatattctcaatcgactggcaaacttcaatgaagacaatatggcaaagaggaagccatcggtgcagagatgcgtggtatgccccttctcctggaaacgcacggtggagtacgcacgaagactggtcgatggttactttcatggcctatgtctagattgcatgcagaaacacccagacgaggattctgagtactgggatcttcgtaccaccagattggtgtatgaccaaacttgccgcattacccacggcgaggcaacctggttctccagtttcatgggccatcgtaacaaacggctataccgcatacgttcctgagtgaacaggaagggatgaatctcgacattttttccgtgacgttactgatcatctgcccgggattttgctgaacaatcctacgcccatttctctttctgtcaattggtacccaccctctaccgagtcttgcaactatgtttatggcaaattccaatttctcaattgacggcagatactcgcaatgttagctgcccttgagccatgaattggcgaatgcatgttttatcattttgtttagagtaataatttgactgctatttgccattaatatctatttctctagaccgtatctttcaattctatgtgcgacacctacatacgacgtattaccctacaatatttatcttagacaccagtgataaaacagtcaagtttaaaagaacctgtgggatgagtgcgaaaacggctctttgcatacatcaaacaggtttcatgctaaatatgcagatgatcaatatggctaactgcgtaagaattgtcattgaaagattcactcatacttttattgtcggcttgatttgataagtattctatggtatgaatatcgacttatactggttgaatagagaatcaagattgccacttatacagatcatattcgtatacatagaaaccagtgtgataataaagcttttgttgttcgctgtaaacttctccctataccttgaatatacctactcatttcagtacgaccaaagagattcagagcctattactggaaaaagtaatttgaaacatgtctagcacttttcagattctctttgtgctggtattagtgggtgattttctttaagttcattgtggtcagacaaagatttgatttttttagaaaatatgaggttcagctaaatactattgaatatctaatgataatttgatgtgacctatacctacggtgagattaaaatgagatataagtggaatgtattcaaaagacggctaaatatacaaacggacaaacaaagaaacgatcaagctagacatatcgtgactcccaaacagttactgaatgttcattcaagtttgaattcctggcaaacactggtcattaagcgtgaatagaacaaagagctgcgtattcattgttgcatttttgccttcttcatggtatattacttcccaagagaccgagaaacatggagattcccttgagtctcttgaaccctaccctattgatctgatatagaaatcacaaatatgttcgaccaactggtgctgggagccatttttgccggcctcagcagcattggcatttggcattctgttccgttgaccggagtcactccttctaactctttcttttggcgcagtcttagctccctagaaattgcgtgttccattcacgagttacgcaaagtccatcctttggtcttcccccatgacgacgcaatctcagaacacgacctccttctacaactttcactcgatgcccaacagtacgaaaatgccaggctggccctggaacactcagctgaagctgtatcactccatgtcaacacccccggagttacagcaacaattttactcccgagtgccacagcgatgccgacgtcggtctatttgaacgatgtctgggcaaatgagcatagctacgatgagctgcaacagttccacccagcccagaataacacgctatatttcgccgtgatggctactctcgtcttggttatcctcacagtgcagataatgggctttgggatgacgaataacatcaagcagcacgtcgaggacctgcaatacgattattttgaccgaatgagcggcgtgcaagtgcaattcgacactctgatgatagagattcgacagttccgaagggaaaatgaacaagtacggcctgttttcgttcatctggcggaggccatcacaaactcctcggccgacctccaacattgtttgttacatattgttgggatgatggaagacaaatacacctcggggatgattaccattgaatccaagttggatgaggtcagtcaacaacaccatgatctgatgagaaatactgaaaatttccctcagattccgagacaattagcttggcttaacatcctgatggcgaagaacatgtccaacgacctgcctgaaggtgtacacatggaccagcctgatttggatttaagcaagagtcctagcatcgagcagatcaatggagctcaccacgccgcagggcaacccaacgggatttccaactttgaggggagtcccgttcttcagaatggaaaaaagaggactagttcagtgcaatggtcaggattggggctgacttaggacatgtgaagatctatttcgtatctgtataacaggggattttatttgcttctctttttttgggtgtatgatttagttgatgtcaagtgcttgggatagaaaagtttaatcagttggatatttcgttatgattctatattagttgactatgcctttcgtatttgtaagcgactgacaatcatgacgcggtttcttcaccaagatacttgcgacaggcagtcttcagcatgttgatgcgcctctgtgtatgaatgaagacctctcgatacatgtccagactctgctggacgacctcctgtcgggttttagtgcctgagcagatctcaagcattctcaattccatttccttgcgaaggaacggcttgctgagagacacactattagggagaccctcaacaacgttgtcatacccctccacaagggcaacacctaaacgggtcggaatgaattcctgcactgagctacgcccactgccccgttgatttatggcgacgtattcacgttctttgatcttggcaatatgctccgccatcgtggcatctgtaccaatcccgttggcatccatcaggccaatgagctcgggctcagtcagatagtttggagcagttgttttgccttcgaagatattggcttctgtgggctcaaagagctcccccagttcaaagttgggaagctgctggctgctttcccacttatcgtagacgtatacatccaagtagtttctctccaacacggtaaggccattggtgtggaagaattcgtcgccatattgaatttcaatttctgtgctctggcccttcgcgtcatcagaacagcaggcgaggaatcgacgggcaacaaattcataaaccttcttttcattggcattcaactggtttggtgaaacccaggtgacaggatgaataggtggatgggctttgtcattgtggcggccagagcgaggagtcctgaacttgccatcaataagtctagataggcattagtcttgtatatgaaacgcaagtccaataagcttactctcgagcgtattggccccatgactcgtcggggtattgcttttcgaccaatttcttcagatcgatcgctttgtcaaactggtccgtctcggttctgggatagctgatgaatcccttggtgtaaagtccttctgctacctttgaacgtgttagatatcatccactatgaaaatgggtttcctaccttcatgatagtctgactgtccaaacgaagaaatcgactgcccatcatttgcaggtctaccgtagtcaagggcaacggtcgccatttgcttgtaggcttctggttcacttttgtgactttggcttgctttgcaaccaaacatcgctctaacatcatcgtcacaactgctcggtcaaataaatgtacccgcttccagagaaagttgacctttttgctttcccggctgagtatgaccttgaggccccaaaatacttctggtttgaaattctggactctcaagtatcgatcgacaacgaaccccaaagtaggaaattggcaggatcctaacttgttaattcacttgcttatatctatgacgaccgacggcttaccatagctaatgaccttttccttcaaggctgccaccactgtttgtagttgtagagtctgtaggcgggtgaatgcagcgccgattcgaagatccagttcgatcctggcagatacagcactggcctgatattcgtcgaggttgactggttctagagcagcccgacgaacatgtctatcctcggatcagtttgagtagacaccaaaatcaacattacttacgctctttctatgttgctgaacttggctcgcttaacctcgatccgggcatttcctgcctttgcctggttacggacctcagaaccgatatgctcaccttcgcgatcacaatccgtccaaataaacagggctttagagtatttagcttgattccggatgttatccgcaattggtagcttgtcctagtgaggatatcagcatgcagtcaggacagctgctggaatttgctcaccttatcaacagtctcttccacgggggcctcgaagagtgaccctggaggacaggacatccagcccttgtactgacggtcaaagtccaagccagtcagatggccgactacgctggtcatagtgaccgagcagttgccccaggcaccgccaaaatcaaaatcaaattcataattcttcacgtatttattcccgcgaatcgcatgctatgctcgatgttagctaaatctaccagaaatctttaaaaggaaacccactgtttgaaaagcacctcccgataagtgagtggccactgcgcgagcaatggcaggtttctcagccacacataggattttgcgagccatggcgagctccaatctagatcacatggggttcatagtgatggtggtcttagtgtcctgacgtcgatcacatcttgttctggatgagaagagacgagatgcctgagacgcgctttggtgcctgaggcatacaatccattttagggacgctattcctaatcggggcaattattggccacttacccgtccaactccacctgagcaaacgcttctgtttccctttctcctctgcggcattttgttcccatatatagtacgataatggcatctttaccacttccccgtgtggactcccttttggattatacttcgtttcatctcaccgttctcccctacttgacccagctgcaatggctacccggaagcttgcgcgaagctggttacgatgtgtatagcttgcgagctgtctatctagctaccaaccctctggtctctgcgcttgccttctgtggaactctggctggtcttttcttcatcgcagccgagatcaaccggaactattctcaagtagaccggttttggagcattctccccgcgctgtataacgtgcattttgccctctgggctcgtttgtccggcatccagacacaaactgtggatacaatcgccgtcgttagtgttatctggggtgtaagttggctattcttccgagtctttacatctactgactgactgactgacgggataggctcgcttgactttcaactactggcgcaaaggaggatattcaattggatcggaggattaccgctggcagatcgtgcgctctaaagtgaacaataactttgtcttcatgatcttcaacctcggattcattgctgtggctcagtcactgctgctccttctcatcaccgctccgacctacatttttgttgtcgccgcatacaaccagggacccgagacctttggccttgctgacttggcattctcccgtgctgcgtttttcttcatcatcattgaattcttcgccgacgggcagcagtggaagttccagtctgccaagaaggaataccaaaccaacgcgcgtattcccgagccttacaaggaccagttctccgctgaagatcttgagcggggctttgttgtcagcggcctatggtcttggtcacgacaccccaactttgttgctgagcaggccgtttggttgaccatgtatttgtggtcctgctaccgcaccgagacttacttcaactggaccggtctgggcgctttgggatatcttgctatcttccagggaagtgtacgtctaaccgaaaagatcaccgctggaaagtatcccgagtacagcgactaccaggcccgcgttggcaggtttatccctcgcttgtctgtcaaggcaaagaagaccaagaaggctagcaagaaaagcacttaatgtgttggttgatatataaccagggaattggagaatctataccagattgattgacatgtttttgctgtgattttctgcactcggcgtcttacctcaaactatcgattttgacacaatgcaaactattttcaatcaatatgttcaggcactaatcactcattgcaacaaattggaaatataagatatattttgggacttcttcaagacatgtttatgcagcacaattcttcgtgtagcgagcagcttgcatgcgacaggcctgttctgcttcgatgctcgagaatagtcctctgaaagtcttactgcagcattcattctctctttatcgaattttcccaccgcccagagaaccaagactccgactccggaccaagatgaactggcatcatagccattcgatagtctgatcctctcaagtggatgtggttcttcccacggccattgtcttttcccccgtcgccactgtctttctctccgtggttacattggaatgttcggctgcacaacgccatcttctctatgtattctttcagcgatgcgcacttgtcatacatgatatctatgatagcgtaggcccttgactgaacgcatcttcatgggaacatctctatcgtatatcctttctagaactgctatgccgtcccgtgcatggaatgcttctagagcatacccaaagggaataattgaggacataaagcgtataaagtgcaagacatacacacgtgttgggtatggcattgctaacaatggaggattagataacttaatagccaatatgtctaatgcaacgttattcggtgagttttacgataatggttcaacagtatctacacgtaaaagacatcccaatctaagacatgtttccaaataactccatattatacactcagttcaagttgtacatatccagttagacacggatatggacaggggtaacaaacgagagagaaaataaaaaaaaagacgatcttcttattgagtacaacgggaggaatgggagaaagggtttgtagtcgagggtcgacatataagaggacgtgggagaggagaagaaaccggggatgcaatggataaatacaaaaagaagagaggctacagtgatatcatgcctcccaaaattggaccaaaaccaaacggaagcacaggaatgcaaagaaacacaattcctccataatctatggaggaggaataggtgtctcgtcccggccgttgttaccggaagtttcttcggggctctggtggtccgatggggcaatggtctggccgcctgtgccatcgaagtacttggcgaactcgccagactcggggtaggggcgcgggccaagaagacgaatgaggtcatcacgtccaagaacctctttagaaagaagctcctcggcaacaataccaagctccgtccgcttctcggtcaggaggtcgcggcactgcttgtgagcctcgtcgatgatacggcgcacctccagatcaatagagcgggcagtgtcctccgagaagggcttgtgaagttgctgctgtgcgtcatcctcgtagtagatgaaaccaagcttggacgacatgccaaacttagttaccatggcagtagccatgcgggtgaccttgttgaaatcatcactagcaccactggtcacggaatcgaagtgcaactcttcgctgacacgaccacctagagtcatggccatgcggtccatcatctggttgacgttcatcagatatgtgtcgccgccagctggcaggtattgggcatatcctagtgcgccttgtccgcgaggaatgatcgaaaccttcagcagcggatcagcccacttgaagtaccaaccacagatagcgtggccagcctcgtggtaggcgacggtccgcttctcctcaggggagagcacaagagacttcttttccaatccaccaacaacccgttcgatggcttgctcgaaatgtctcatgacaaccttgtcggcattttcacgggcagctatagggagaaagtgttagctttgatagatacggagaaatcatgcataagaacttaccaacaagagctgcctcgttcacgcagttggcgatatcagcaccagcgaaaccaggagtcagagcggcaagtctgccctccatgtactccaagttctcgtcggtgacaatcttcttcaagtaaacccggaagatctgtttacgaccatccatggtaggtcggtcaatggagatgtgtcggtcaaatcgtccgggacgcatgagtgccttgtcaagaacatccggtcgattggtaccagccaagacaaccacttgctcagaggtattgaaaccatccatctcagtgagaatctggttgagagtgctttcacgttcatcgtttccaccaccaacgttcgactttgctcgagactttccaatcgcatcaatttcatcaatgaagatgatgcagggggtattcttccgggcggttgcgaagagatcgcggacacgagagggtccgacaccgacaaacatttcgacaaactcggaaccactgacactgtagaaaggcacgccggattcaccagcagtggccttagcaagcaatgtcttaccagtaccggggggacctgagagaatggcaccacgaggaatctttgcacccaacttctcgaaccgctcgggttgctggaggaagctaacgaattccatgatctcaaccttggcttcgtccataccagcaacgtcagagaacttgatcttgatatcggtctcgtggttgaagcgtttggcacggctctttccgatgccaaagattccactttggccgccggcgccgccgccagcacgtcgagacatccagaagacaccaccaaggaagaggatagtaggagccaatgacatcaagacgccgccccatggggtttcatcgtgataggcgacaggaatacgttcatgcgagggaataccgagttcacgctgagctgcgtcgatcttcatttcgaagctgtcgacggaaccaatactaaagtagacataggaggcaggctgaccatttgaatctgcttgagcggcagcttcgcggttgagatcgacccgaaccttggtgtggttcaggacggtcaatttatccacgaggcccttctcgaggtagttcgccctgaattcttgccaagtgatttctctacccgcactatcaccggggaaaaagctgcggtaggcgtagtatgtgacgagagcggtaacgaagaacgaaacgggatcaaagcggaactcgagaaccttgcccatgttcggcggcaccttgcccttcttgtcaccctgttgcttcttcttctcttcttccttctcggaatcttgcttttccttggtatccttttccttcttaggatccttggtatccttttccttcttaggatccttgggatccttgggatcgtttggcggttgtgcgttggattgctgttcgccacccttcgccggttgctgtccttgttgatccttctctgagtccttattgaagtggacgctggattcttcgtcacgtttggccatatcactgcgcttttcagcgggggtgcgcaagtctgcgataccgcgctttgcgttttgtgcttgtctagccagacgctcatcaacatcgtaagttgagacttgccacaagaatcgcgacatcttgatacgatccattaatgtcggttcttgattcggatcgatatacgccctgacttccggtaacagtccatttttcatgatgtagtttcggatattggtccgtcggtccacatccatatcttcaagccatgcatccaccattttcaattcagcgtcggtcagaagtgacttcgggttctttgtttggtggtcattgttgcggccatctggtgtattgtcccggccgttgtcgttgggtggtgtcggaccttgcgtggcgtaggttctagcgcggcttgataaacccagatgtgagggtcttgacgggcgcacacgcatagaagccagccccgtgcgaccggttgaatccgcggctttcctcaagtagcgagcgaaattgcctggccgtcggagcagagtagccatggtcgaggaatgggagccccgagggctgcgagggcgggggtaaaaggtggtcaatcgagtttagagataatggatgttatcaacaatccatcaagattaggcgtgagagaaggaattgagctgggagttgagaagctctaaggcatccaggtccgaggtgacgccgtgtggttccttccagtcggttctaaaatttcgccgatccggctgagtcatcggaagcgcggaggaattaactagcttaaagccgtgattactctaacgccgtcgtttatgaattccgttattgaattagattgcctaaggttgatttggattggagacatgtctgtacatagtcctataagtaaggccaacccctgcgccattcgctgcgtaatagaaacccataattatcctggtcactccataagagacctcggggatggtttcgaaataagaagaggagcgcttcattatacaagaggtgtggagataatttagtgtagagagataacaccggaaacaataataccaccgccatgagctacataagagatgaaggtgacttcggtcaatcatacagtcatcatcactgcccaggcagtggcccaccgggaccagctccttcaaaagcaggaaagttggtggacatatccgcccaatcccactcaattgtcattggcatttgccagagatcttgtgggacaaatggctgctgaaatggtgccatgccggggctggcactgaatgggtgttggtcagagaatccaacattgggcatttgatcaggactcagcatgtctgagaactcctgtccaatgccaggcatgggatgaacattgcttgggaggtcagcggggagactacttgttgggggcatggcagtccccgggaatggtcctcctgtagcgggcgagggggcggcagccgtagggttggtaaacacggagggagagaaggatgtagaggtgggtggttgttgtgttcgtttggccgagggtgagtttgtcgactgttcttcggctgcgcctgtggtgtcttctgcattcttgcgtttctttcgcgaatgagactctttttcggttttatccaagaccaccttggcaattctctcgaattcaccgcaaaggcctagcatacgcttgatgctgccgtttgattcgtcggacactagggtagaaaggaagctgactaccacgctcattaatttaacatcggatcgagcacgagcatcggtgggattctggaggatgttggcgaaaagagttacgagggcagacaccgggtagtagagaatcagcctggtatcgagttagcaactgttcgttttcacaattctctgaaacgtaccaaacacaagcaaagtctccttgtgggatatacttgattagattaatcgatgctctggcagcagtgacacacaaaactgccgacaagaataccctagggttcaagggccgtgcatttaagccttgtatggcatagttggatagacggcttgtccaatacccgtgatgaaccgacatccgatgaatggtggtcaggcaattgtagtaggcaaaatgtagaacaaccatgtggatgatgaggggggtgtgggtggcttgaatgtcgtattcggggcggaagtcgataggaatgctgtctttccaatcttccagctctttgtcaagctcaccgattgtattgagcaattcaccgtctgattgtttcgatgctttggcggaataaagtcgcttgtatactctgctttcaatggtggcaaattcacacaatgaccggaataggttgaacttgcttctaccatcagatagtggcacatttccaacattgtccggcggatcttcgctcggtaactcgacattcatatcatcgtcatcctgtactggaggtcgaccagagcgtaggcaaatgctaaggaattggtcagtattggagataaaggtattcgggggtcggaaagcagctcatactctttgtcaagaagataggcgatccagaagactctcttccgctgctcaacttcaacgacattgaggccaaagccagagccgcgtttgtgtagaccaatgctgtgggaaagtcgaatcgccgcagcgactagaaagaaagcaggctgtgggttaggggttccttgaagaaagagtgactagaagagtatgtaagacaaagctacaaataccagggtaggaaactttaccatgcccaatagcgcttgcacgctcaagagatccgtgttgcgcattgtaagctcggtcaaaactcccatggcgttcttcaaataaagccaagctcttttatcctcttcgtgtggcaccaagttactcataatccgcagcctgtgagatatcgccagaacaacatttatgcttgcccaccagcccgaaccctcgtaggggtcgcgggaatattgccgctccaccaagtgcatgaatgtcgcttcgtgaaacagtgggaacatgcaattgaaattttcaaagaagtccttgaacagagaaagggcttcttcctttggcgggagaggtttgaacacacgccttgcgaaaatatcgctgaagatttcgggcttccagtacatccatttattgtcatcgacatatgctgacgaaatcatgtcttggaaggatgtatcgccggttttctcattgacccattgaataccctttggagagaatatagagaatccagaggatgatcctgaggatgttagcaagctagcccagcacagttgcgcgaaaaagcctaccaatataccgagtttccccgcagttgttcgtcaccaaagaacacatcatatccgacagtgcctcaacttcggtctccgacttttgtgactctggtgatgtagcggctgtctgggggctggagttggattccatacgaggtgtggtttggtgggagcttgaagcttgttgagctgcagctgcttgagccatgaacatgctggagcttttcgttgcgttcaacgcattcgttcgatccgctagccgtttctccaatgttccgagatctgtcttgccgccatcgtcttctgacaaaagacccgacaaacgcaacaacgactccatccgacccagtcggttttcaagaccttcgatgtatttcgctctatgtaagaaatccccaagtcagatatagaaccccatatgcaatgaagtatacaagtatacataccctttaggaggatttcgcttcttctccacttgtgtgaagatgcattccgttttgtagttaatgcagtgagaacattttggcatttttccatcgcatttgattttcttcttccgacacatatcgcacgcctgtttgctcattaggggtgttctcgatatccgtaacgggtaatgatcctcactctcgcgatcctccgtctcttcgcatcgttggtctcgtcccccgcgcctaatgacgaatcatcgtacatagatcccgcctgcatctgagacggatcgtagctgaatagctgtggtgtctggttcatcatattaggctggtcgaagcccatgccgtcgccgtcccccaggccatccattttgtgtttgaggggccacggaaactccgcggagtaaaagtaatagcggtgataagtaacgggtgatactgcggggtgctgtctctcggcgcaaagcttttttgtttcgcccctgagagaggagagggtgcgctatagattattgaagtgaatgacgcatgcaaggatgggatctttttttcgagggagtagacaatgaaatcactgggcacaattaccccaaccttggaaagttcggggctttaggtaagaaatgactcaaccacacgtgaggacaaggatctgtgtgaatcaatatgactccaactgtggcagtaagagcacaaaatgctctaccgagttacgctatacaagttgctgcctcgaagattattttgtggcatgacggaaccccgaaacccgaccgccgagcacacggtcccnnnnnnnnnnnnnnnnnnnnnnnnnnnnnnnnnnnnnnnnnnnnnnnnnnnnnnnnnnnnnnnnnnnnnnnnnnnnnnnnnnnnnnnnnnnnnnnnnnnnnnnnnnnnnnnnnnnnnnnnnnnnnnnnnnnnnnnnnnnnnnnnnnnnnnnnnnnnnnnnnnnnnnnnnnnnnnnnnnnnnnnnnnnnnccggaaccccgaaacccgaccgccgagcagacggtcgatttcgtccgatccggggcttgggcttccgttcagtctctggcaatccactctttggttgcgccgatcaaaggcctttttgctctttgtgtatcgtaattattcttgggagggtgtggcgttctatatggggtaggacggattccgtatccgggccttgtaaccggagagcagccctacaacatacgtgtttcttagcatccacctagacaatagttgaccttatggttacctaccgactccgtagttagttaactactccagagcttggttatgtatgactaaaactcaccatgagcgacaatttagaggtatgatctgatgtgatgccgcggattgccggttctatgctggatctgtcggatagatagtaataaaagtacattcaatgaagagcggcgatctcgtagggatatgtgagaatagtacatataatacaacaaggttcgtaaagagcagtcctgttcctccgatcttgtaaatgccaaaccaacgccacgctatatgcccaaaatataatgaccagtttgtcatgtcgagacctaaattcgctttcccatcgtgacccgagggtccatgctagagaagaaagaagtcaaggccgcactggcaaggtctcaaacatgtttgtcgaggaattccttcgcctcgttaattttggtggccaggtatggactaccgccgcgatcggggtggttgagcaacatgagctggcggtggttcttgcggatcttgtctttggtcaaagttcgttcactgagagatactgtcagttctggcacatcaaaggtttgtcactagcacttacgcaagttgtagaatcagagacgcttcccgacggttcatgcgcggttcgaatcctctgttatacgttagtcaatattccatatgaccacaacctggcgaaatgtccacgaaccccttatagaatgcctttccggcagcgttcaatcctcctctggagcggcggtaagcgaccagaccggcgcggccctgtagacaatgagttagtcctgtgctgctagcaaatcactttttaactcaccagaaaggcggttgtggcaatgccaaatccaacagcaaggatagaggccattttgtagatcgagatagagaggtcacgaaaacgagatcaagtcggttggaccggggaatgagcgaagaggcgccgggatagaaaagtcagcgcgggtgtccccaaaagggcttagcgtggtctgctccaccattcaggcccgaagctacagaaaaagtttcttgcgactcaacgaagacataaccaacaccactctacaaccatgcggtaagttttgccgttaatttttgtctctatccgttctacggaatgctaatatcattttcatctgcagtgttgaaacttgtcacttctgttcccgcccggctttcccgagtaagggaatcacattcgtccgcaacgatgcccgacaatttcgtttctgtcggtccaagtgccacaagaacttcaagatgaagcgtcagccccgcaagcttaagtggaccaagactcaccgtgcctcccgcggaaaggaaatgatcgtggattcgtcgcttgttctgtcccagttcgccaagaagagaaacgtccccgtcaagtacgaccgcaatctcatggctgctaccatcactgccatggagagagtcgaggagatcagagcccgccgcgagcgtgtattcacgaaacgccgcctggccggaaaaacctcccgcgagcgccagcgcgaggcggaccgcaaggtcgtcaacgagggcgagcacctcatccggaaggaactccgggagcgcgaggagggtctccccatggtggccgagcagagcaaggtttccaacagagttcacggcgaggagagagttcgccagaagcagaagagcaagcttttggtggatggtggagtggaggagcagatggatatcgactaaattttatcttgggcatctatattttcttttgttttgtgctttctcagatacgacacggttcctgcagcacgcagattttcggagttgggcatgctttggtgttttaaaagcaatcaatgtttttcatcatatctcatatccagtgggctgttagcctcttactgcttgagaggctaattaaaatgtgtttacaatgacccaagatgttacataggttgctagtttgctagtcagtacagtggccagagtggtcaaacgaccataatgagatctttggagaacgaccccaacaaatatcccatttaggcaaatgctattaacctcgtctacaccctctatcaacaaagttctcttagtcaacccacctccctctgctatagacacagagtagcctcaagctcaaccgtctatagtattttaagcaatgattcaacataaaatcaatacttggctattgtatctatatacaactaggactctggggacttaagcggatcagggtcgttctccgcaatccctgcaaattggaaaacaggcgacccatccaagacaacaagagtttgtaccctacgtacatagggagaggcgaagatcccagtatcaagataggtagagtctcggtagaccagctaagataaaacgatcagcaaataggagcacacataggtggaagacataatcagccagcttgtgatgctacaaggatctgaaatcaggtagccatggtagccatggttgcagcgatggcaggaaggattattattgtctcacaaacttccaaagatataggaatatatatctagcaggagtagctagagggagatctttggcagcaaagaaccaggcagttagctaataggttgtttgaaactctcataaaacatgatatgagaaaagaggaacatgttggttctgtctgataaggaaagaagatgaagacagtgagagagggagatgaagaaggggaaggtgaatgagggactatgtcaagtcagtccaacgtcagaactgatcgaatagccaaactctaggatatggaagaagaaccgaggtcgtcaggtatacaccatgaatgcacgcggaacagcgttggaagggttaaagataggtagtctaaagaaatagattgagggttatgtagctagaagctagatgatgtgcgggctaaatgggaggtaaatgatagaaagaagagacatcgaagaaatcgagcggtgttcttgtgccgcgcttgatatgatcagtaaaatactaaatacaatacaagaatggccggcaagaagatgctgatggggaaagcgagaggctagagagagaaaaatgtgaagcaaccagaggtaaaaagaacaaagcgcttctctggtaagcgcaaactcccctattcgatcatccttccttccatatatgtagatcaaaccaggtcctgtagtagactgcgccaaacaccacctccaagaggaggagaaatgaaactcagaagaaaaaaagcgaatgcaatggtggaggttgatgatggagaatgataatagacgggggaaagacgcgggtgggtatgaagtagacaaaagtagatgagactcatatagacagggtatagtctcatcgaaaatcatctgcatggaaataaatatgctaaactcatgtactgttggatcggagcaatgcctggaaataattagccttgctgtttgcgggtggctctgaacatacagctaacgtacccgctcgtcgatgacctcttccttctcttccgacggactgaccacactccctcgagtaatgggaccagaggttgtgatagaccgggaatctataaccgggcgaggggacggtaagggctgctgctttgaccgttgttgttgtggtggtggcggcggcggttgttggttctcattcattgagtaattggggtgcatttccccactgctcgatatcctagactctttgctcttctccaatagtgacccgccaagggtagcacatttgaggatagtttgcatcatctggttttgtttgagaggtttggacaaatattcgtccatctgggcctggatacacttctcccggtcacccaacatggcgtgggcagtgagcgcgataattggagttctttgaagtccactctcgcgttcatattcacggatcttgccagtggcttcaaagccacccatgactggcatctgaacatccatcaaaataacatcataacgacgtttcttgacagcattgacagcttccaagccattaccaacaacaaacacgttgtggttatgtttctgaagaatcttcattgcaagttgctggttcacgtcgttatcctccgctagaagaatgtcgaatgaacgtgagttgtctgtggtgattggcgtcgaccggccttccaaggctggtagcataccgttgccgagatcaatcggctgacacggggtagtcatatatgagctgatacccaggtccaaagccgacttcaagctcacgcacactaaaggacagaccaaaacaatcggaatgtacttgaactcgtcaaaggttcgcaacacccgggccgtgtctaccgagtcaacaataataacatcgtaggcatggcctgattccttgccagaaggatcttggatctcgggcgggggaacatgttcctcgttccgtacaaccaacggctccaggtcaatcttcttcaacatcttcatgacattggtagcttgagcaccgttctgacccttgtcgatgaacaacacccggtggttcttgtacggcaagagctgattggcgataacgctcaaagactggtccgcgagttttaccacacaggtgaagtggaaagtacttccatgtccatattcagaagtgacccagacgtcaccacccatcaaattcacaaggcgcttggaaatcgacaatcccaacccagtgccaccaaatctgcgggtggttgagccatcggcttgttggaaagtgtcgaaaatgagatcaagcttatcctcttcgattccaataccagtatcagctactgagaattcaaaggcgtattcgtcggtcgtgcattgctctctgtccgactttcggatagtgagcttaacctcaccatgctcggtaaacttgatagcattgccaacaagattgaggatgatctggcggagacggaatggatcgccaatgacataatcaggaacggtgttgtcaacttggtaggtcaaactcaagaacttctcgttggccttcacagccaacgtcttgagagcattgaagacagtacctctgacggtgaatggaatgctctcaatgaccatccggttggcttcgatcttagagatatccaaaatgtcatcaatgatagtcaacagactgttcgccaagttgtgaacgacattcaacatttctcgggtataaggcttgagatcatccgtatccaaggtcaactgggtcattccaatgataccgttcatcggcgttctgatctcgtgcgacatgttcgccaagaactctgatttggtgcgattggcgagttcggcagcctccctagcggcagtgtttcgctggatactgtcccgtaggttggaaaccatcttattgatctttcgcttcagttcgtccatttcaccagacgcattgaccgtgatcaacttggtaaagtcaccgtcagtggcggcatcggtaatttcaccgaaagcgcggacttgggatgtcaagttctcggccatggtattcacatcctcagtaatttctttccaagtacccgcgataccctccacgttggcttgtccacccatcttgccatcaacgccgacatctcgggcgaccttctttagctcagtggcgaatttggccagtcgacccaccatgtggttgatagtgaccttgagcgtaagaatttctccctgagcatgcacttcaatcttcttgctcaagtctcccttggcaatagcttgcgtgacatcggatatacttcgaacctgagacgtcaaattctgggccatggtgttgacattgtccgtcagatccttccatttgccttccacgttgtccaccttagcctgcccgccgagagtaccatctgtgccgacctcacgagccactttgctcacttcaaaagcaaaggtattgagacgatccaccatgccattaatcgtactcttgaggtcgaggatttctccttgtacattggcagtaacctttttggtgaggtcacccttggcgactgcggtggtaacgtccgcgatctcacgcacctgcgtggtcagattgttggccatacggttgacgttttccgtcaaatccttccacgttccttcaacatcattcacagtagcttggcctccgagaacaccatcggtaccgacttccttggcaatcttggtgacttcttgtgcgaattgccgtagttggtccaccatggaattgatgatgttcttcagttctgctatttctcccttacagttggcctggaccttctgcgtgagatcacccttggcaacagcttttgtgacagtagcaatatctcgcacttgcgtggtaaggttgttggccatggcgttaacattaaccgtgagttcgttccacattccctgcacaccttcgatttgagcttgtcctcctagtacaccttccgtaccgacatcacgcgcgactcgagtaacttctgttgcaaacgtccgaagttgatctaccatggtattgatggtttgttgcaactccagaatttcaccttgggcccggctctcaatcttctggctaagatcaccatgagcgacagcggtagtcacggcggcaatttctcgcacttgatctgtcaaattcttggccataatgttgacgttctccgtaagctctttccaaataccatggacgccagtgatctgagcttgtccaccgagtatcccttcagtaccgacttcgcgtgcgacacgggacacttcactaccgaagacttgcagttgatccatcatagtgttaattgttcgtttgaaggtggcgatttcagggtccatttccagtgggtggatttgaaccttcatagataggtcaccgttggcgacttgagtgatgattccaccgatttcacgcaaagctttctggaaggcctcgttggcctgctggtgtttgcgcaactcgcgctcgagcagaacgacatcctcattttcgaccttggtaagagcgcggcgagtgtgctcttcctgtttctgcaattcctcgcgaacctgggcaataatatccttttggctgcttatctcctcggcctgcttttgtacgtggttgcgaaggaagctaatatcctcctcccgcacgacacgcgtgccgttatcatcttcgtcatcggattcgtcgtcaatttctcccaggggtggttcgtcggccgcgggaaccgggttcgctttttgctgtgacagagagtcagaatcttgaccggacgacaagcgagagagcccaaatgtccacaagaaattcctctcgttggcctctccagcagacggggtggtctggatggggtccgtctgctgttggaaattgtggtgactgacagcttggaattccagatggtgcacgcggcgcaccagggcctcaagctctgcttcgaaggctgccttggtgggactgtattctccgggaagtttggccgatttggtaccgttgaagaactggaaatcaaatgagggcgaagaggaaccggggacagagtcgtctcttgctaaattctgcagcacggcagtcgcggccacgagtgtctcgtccacgctagccattgtggcctacataggtcagtctcgtagtacaactaacgtacaacacatcttatagtaccagcacccgagctggaaattatgggatggggttagggtatcggagagcgagcttaaggatcactcactggcaagtctggatcctaaccggatgacagagatatagtctaattaaggcgacatgaggggggaagagtccaaagagaagacaaggaataaaatagacacccgagtcaacgataaatatgaaagggaataataatatggcaggtcgggaagggggaaaataggtggataagccctggagagggttatgtaagccaccactagggatggctctgcgggaagaaagagaaaaggaacttgggaaagaccgagatatatagagaaagatccaaatataagggaaaaaaagtgaggtttcgcggatgagaagagaaaggcgggaattctaagatttggggatgagggaggggggaagagattttgaaaggggcggtgatatgtcgcctcttttgggttttcttgggctgtttttttctgtttttttctctctttcgatgtctctgatctttggggggaatctatcaatcgccttcgcgctgtaatagtgcaaatccactggcatcaagcggatcaaattgggtattcaccttgacggagtcctgcccaggtgactggatatggcgcacggactcgctctattatagtttcatcggaagagtatatgaaggtactccggatactatatccaaactactcacaaagagcttgtatgcatctgtacactcaggatccctatatcgccagagaatatgtcgtacacaaatcaaatgtgtttcatgtggaggtgattgcctctgggactagtgccgatcacaaggtggctccggttcgtggtttcctttctcaatactgcgtactctccatatccctggaggcaaagataggcgagacagagtttgccgaacaattggctgggatccagcgagatccagtcggagttaatctgagcctataggagatcaacgagaatgtctcatcgttagggtactgccacagatccatagtttggtcttttttggtggctgagccgtccggcttagcgtctcccgttggccgaggtattcataacgtcgattggtcacacgggacctcgtgaaagtgaagatgttcaatattcggtaggagtactccgtactcgtacctggatcatattgactatatgtttcatatataaaaagagggaaatgtgtctcaatgggtaggattttaggtggattttgtatggattaaatggaatccagggggaaatatatacccaacgttcccggcagtagatagtgatacatggtggtatctgttgtatgtagtaaatatgtatttatcttctcgagagcatgtcaagctgtcaactggtcaacggtcaacaatggcgggggtcaaacggcacaagtggtcaatgtaccccgccgtattatcttttggaatcccgcagagtcataattctacaaaatatcgtcggatcaaaagaacgcccttcaaaacacccgtcaaaaattgactctgcaggagtaggctgcagccatggcgtccgacttaacaaaccagatcttggacgccctgtccgcgtccgatgcgcccatcctctccagcgaagctttcccctccaccccctcattgaacgttaagagtgcgctcgatcgccttgattcccgccagatggtcgaatatgagaccttggacaaggaaatcgttactctcactgcggagggccaggagattgccactaatggcagtcacgaggccaaggtcttcgccgtggtgcttgctgctttggacggattgaagatctccgacttaccaggaattgtgggcaaggagaatgccaaagttggccaaggaaacgccttcaagcgtggctggattaagaaggataaggatttgctgcgggcatccacagattcgattgtcgacgagacgcaacagcagctgctcgaggttcaaaaaacaaagaacctggacgataagaaggccctggctgacctcaagcggagaaagttggtcggtctggcaaaggagatttctttcaagttcaccaagggtcccaagtacgcccgagaattcgtcaaggagcagaccgacctcaccccggagatgatcgccagtggctcgtggaagacggcgcatctcaagccctacaacttcaatgccaagggcgccccgactccatgtggtacgctacacccgctgaacaaggtgcgacaagagttccgcaacatcttcttcgagatgggtttcgaggagatgccgacgaaccgcttcgtcgagaccggcttctggaacttcgacgctctgtttgtgccccagcaacaccccgcccgtgatctccaggataccttctacatctccgatcctgccgtggcagatgctcctcgcgaggatccccccaacgacccccaccgtccagcccaattaaagtccgagaagccacttgactacaaaaagtactgggacaacgtccgcgaagtccacgagcatggaaagtttggctctattggctaccgctacccctggagcgcggatgagtcgcttcgcctggtgctccgcacccacaccacctccatctcgacctacatgctgcacaagctggccgccaacccccggccggctcgattcttcagtatcgaccgtgtcttccgaaatgagtccgtcgatgctacccatctggcagagttccaccaggtcgagggtgtcattgccgacttcggtctgactcttggtggcctgattggattcatggaggtcttcttcgccaagatgggcatccacaagctgcgcttcaagcccgcctacaacccctacacggagcccagtatggagatcttcggctaccacgatggtctaggcaagtgggttgagatcggtaacagtggcatgttccgtccagagatgctggagtccatgggtctacctaaggacttgagggtctacggatggggattgagtctggagagacccacgatgatcaagtacgttgcatcatctacctttcgtttacatttactaatatctcttaggtacgccgtcagcaacatccgtgaactcctcggccacaaggtcgacctggacttcattcagaccaacccggctgtccgtctcgagaaggattaaacagggagatactcatagaaaaaaagaacgtgcttttagttgtgtcttgcttgtaatcacgagtttatgtcgaaggaaacgtattacatatcaacgatggacaggttgtgaatacttggtagaaaggctctagcgtagttgatcaatgtagatacaaatgaaagaaaaagaaaacatgatattgaacatgtaatattcatcgtgcatgtgtctacattggatgtcctgcccgtatctgtgccccagcgcgtggatctctgcagcagtggctcatcaggaggcaaagctcgaaagcataatcttcggcaacaacaagtatttcttacctcctcgctcatggagatggagacaccgaagaccaagaccagcgagccagtctggttttcgagtccccaaagaatgaggaggtcttgatatgccaaaaaggaaaaagaaaaagagaagacaggtagacagagactaagaattatatgaaagggatatcatttcgattttttgacattgcttttttttgtgcttcatgaggttgggcgggagtcttataacagaaagagaacaggcggggaattcgtagagaaaaaaaacctgacccattaagtcatcgatattccattcatttcgagagataggtaggaaaacaggagtttctcagaggagaaaaagaaaaaaatgaactaaggaacataactatatcccttgcgtcccttttttggtcttgaaaccaactccccgaacacggaccatcaagccacggttcctctgcagccaattagccttgttgaacatgaaacatgcggaatgtaatgtagatgaccatcacgtaccatcaaatcaacccgtaaacaccgcccagtgaaaaaaaccccacattgctgtggatgatttagcgctggctggaggcggcccacacgttcttgaggtagccatcacgctgggtcaggcggttgaaggagtcatcgctctcgccgcgggcgcggatgaagccgcaaagagcgtaggtctggttctcgccagtgtagcggccgttctcgtcaaccttgccgacggagagctggacagaggcgtggtcgttggccttgatgatgcggttggtggcgctgcacttgcggggcacgtagctgttgagaaggaggtcaagttagtggtctgggttcttctctgggggtttgcgagcgaatatgttcccctccaataccctgtgtcctggtttttctgatggctcgccaacgatcgcaatcacgcgcgctgagtattttttttttcaatcctcgcaatctctggtcacacctagtccatctctttggcttgggattgaggcgggattgctgattgtacgcggccacgcagaaacagggtacagggtatattgggactggaggaacgggtgtaaaatccatagcacgtacagatcgacgatctctcccttgtcgttctccattttggcgggtttggtgttggggttttgacgggcgacggtgaggttggaggtggagggtttttctgccgcacattaaattgaagacctcaaatgatttgtgtgggtcatgtgaccctttatcgagggctggcgtggccgaagtggggtcgcgtgggtttaacggaagccgtactaaaggccgtggcaatttcaactcttaatgctcatagtatcgattgcgggatatctacctacggggtacatatggactgatcgtactatgggtaaatatatgtatgtatctatatatcttacaggttactcttttccctctcttttttcaacacgtcctttttccatccaacagccacctctcgtgcacttccttttttgaaccgcacaagaaccactctctcggactctcctcgcttagaagaccctttcagctcatgcccgggttcattcagacccaacacagatcgcccatcactggtcatgagaatagattttggggatatgcacttctctgtccatggaggagagccagaatgaacgaactcgacaagcgcttgacgacgcttctccatttcttccacggaagcatctgcacgaggctctctgtccaggaatcctgacaccaaatgtaaaagaaggaactgcggcgggaatagaataatttcagccttttgagcacgactaacccattccgaggcgggaagaaactgtgcctccgtaacctcgattccaccatcactcgttgggatttgatgctcctcgtgttcgccttctgctgggagttggtcgaggattttcttatccacgttgacgggtaaaggtaagaaatatagatacatctgagtagtgtatcgcttaggaatgttggttggcgtaacccagcgagtaaaagggattaattggcctgtagagtcagcgtgctgccctcgggtgtcaatgcgcagaatgggcacttacctatatcgggctcagcatcagcgctttgctgcttcaaccattcatcaaaagtggtcttgttctgatgaatgagtcgtctgccggcctctcgggtaggttcgtcgacggcaagcatcttcccggagctgcggtctttagctagaagaattccactctcttcaaagagttccctgatcgctgcacgtcggtaacttggggaatcttcatgccgtgctagatctccgggtggtgggcattccccatcttgattagacaagttgccaccaggaaagacatgtgcagatgcaaaagaggtagaggtcttcacgcgatgaagaagaaggacctcgttctttgaagatataagaagaacgctatataatagttagtacccaattcttttttgggggaatgcctgacatcgcgccgtgaatatctccctagtcaatgtgtcatgtggtcccttgcgcttacctagaactaggccgggacactgcgggttcactatcacgtttcgggctcgacatcttccgaggatttgaaggaagtgtagttgtgtattgtctcaaagcaggtttacagctcgggcgcaagggctggatcaaggcaatatgagatgcgcgagatgtttgaaaagcaaggccaacagcaaattgaagaaccaatcgctgtggtaggtgacaagaaagagatccttgacagataaaggacatcttaaatcttaaagcctatgaacggcttctcaatatagtaaaaaaagcaaagagtcgggagttcctcggtaccccgcatgaagcttgacctcatggagcttaaccgaatgcaacgccatgtgctcgggcaacctccagcacttttacaaaacctctacttgatgtttacggttggaatagattgagagaaaaataaaacgtgttggctcattaccagaaatggcgtaaaatcttcaaatcgtaaaactcctatcctgtacccttatttttaattttcaaggccccatcatccatctgggtgaccccgataatatatattcacgaagtccagtcaactcttagaagcttggatcttacgagtaaagcttcttgtcgtagctgtggagaccgtggacgttaccctcggtcatagcgctagcacttcgcatctcgaaacgcacagtgcccttgttgacaccgtcgtgcatatcggtcaggctcttgacaccaatatcctgcagggagtgctggacaccggcgatgaggtaaggaataaacttggtgacggatccgcggtcaaggacggagccagcgacaccctgggcaacaaggacgcggtccttctcggagaaatagcgagcagtaccagcgttgctggccttgctgtcctttccatcaccaccggccttcttgtcctccatggcggcaatactgcccatgccacggtaggccttgacgagctggccctcgttgctgacgaagtactcaccgggagactcggtggtaccagcaagaagaccacccatcatgatggtgctagcacccatagcgagacccttgacgatgtggccgacgttctggataccaccatcggcgatacagggaacaccgaagcgagcggcaaatgttgcaacgctacgcacggaagcagcctggggacgaccaacagccataacctcctgggtgatacaggcactaccgctgcccatgccaattctcaggccatcgacaccggcggcaatcaaagcagcagcctgttcacgagtgacaacgttaccgccgataacgtcgacctcggggatagtcttcttaatgtacttgatcatctcgatctggtacatagagttaccctggctagagtccaggataacaatgtccaacccagcttccacaagaagctggaggcgcttcttgtcctcctcgcgagtaccaatagcagcggcagcgatcagctgcttagagtcggggagcttggaggcaagggggtagtggaggttcttcatcagatcagagcgggaaagcagggcgacgatgttgccgttaggatcgataataggaagctttcccttcttggaccgacgaaggacttcgttggcttcggctagggtggtgccggccggggcagtaacaagatccgtggccataacggcagtcacgggctcgtcgagaccagtgtggaactggatgtcacgcgaggtaaccattccaacgagcttggacttgagggttccgttctctatgttcaaacattagcatctgctgtcgaaagatcatgtgagggtaatatccaaaaagacaaattgctcagataaaatctggttctctacagtgcaactttcgttgctgcagtggaacgaaagttataattaaaagaggatggtcatcatgcaaagtggatgggcaggtgatgggagaagtagatgtggatatcttaccagtgacagggaagccaccgaagccccacttggccttcagctccttgacctcaccgacggtggccttgggagagatgacaacggggtccagaatgaaaccattctcgtatctcttaaccttacggaccatctctgcctgatcctcgggggagcagttgtggtggataacacccagaccaccgagcagggccatgtgaatagccatgttgtgctcggtgacagtgtccatgggtgaggacagaaggggagccttcagggagatacgcttggtaacaggggtatccaatgagacatcggaagcggggaagcctatatgggttagaaaaaaaaagaattttctatcttgactgcggggtccagcttaccgatgtaaccaggcagaatcaggaaatcattgtaggtcaatgcgccgtgcttgtcagagtcaagcagggtatcggcatcaagaccatcgagggtggtgtaggtatccaagacctcaacggccttggtgtagtcggcgatctcagccttcatggcagcaccaggtgcagcgtcgccggcggtgataggcatgatgaaaagaaggtaggtttaaattgaagactgagacacgaccgagtgagatattaatcaacagaaagaaacgttctgttgatggagaaagtcgagctttcccaaggaagagaagaagaagaaaaagttcgagcgaaaaattgtttccttttctctcccgtgcacggccaagccaagaaaaggcttggctattttgggtatagcgtactggcttttttcactgttcgcgcttctgattggcttgtaaacgagatccttcaaggcggtaagctttttatgcttatcattatacatcgatgcaggtacatacatcggtactattatgtggtgccatgtaacgtcgttgggtatgattatgatgtacagtcctcttgtcaaggttatttttccgatgagcgggacatgaatatcgattgccatacaatatataagacagcttttgaaggtggaagtgaaggtccaatgtgagttggctataattatcagggtgccattcttgatatttacatatgtatataaaaccacataacggaccaagatccttgttttattgacatggttggccttgcaacggatcagtaatcccactagttacctaccggcttcaagtcccgtacagtatgacgacagaatgatagtagcaaatgcaagctattaaaggcagcatgatttgattcaaattgtcatcaaacatcaattctcacttctgacttttgctatcgatatggcttcatctcctatgggtgaacatggcaccttcaaaccagcaccgggaccacagtctcagaacaagccggggtaagtaatgtttcacccgagcgaaatatatccactaagatgatgtgctagattggagagcaaaatgataaatcccagtgagtcgaccaaactggaaggccttcacggcttctcggaatatatgggttccgggaaattgaagggcaaaaatgctcttatcactggcggggagtatgtgcagcaagttcgggaacaaacttatttaggctaatcaatccttagttctgggattggaagatcagttgctattctgatggctagagagggcgcggatatcactatcgtttatttgccctcagaacagcttgacgcagagacaaccagaaagtctattgagcaagagaagaggagttgccttctcatcccagccgatttgagagatcgcaaattgtgccagcacgcagtggatgaacatgtgaagaagtcagccagcataaggttttgttcctggtattagcaaatgactgaccctgggagtctacagatacggcacggtcaatatacttgtcaacaatgcgtcggcacagtacctatgtacggaatttgagaacacagatctggataagactgaagacatcttcaaaaccaatatcatccagatgattgcgatgacgaagtttagtcttcctcatatggcacgaggtgattcgtgggtgctttcttctctaatctatatcatcatatactcacgcacttgctgcaggatcatcaatacttcttctatcgtgacttttcgtggctcgaaaaccatgattgattatgccgcaaccaagggagctgttatcggttttactaggtctttagcacaatccttgattccaaagggtattcgggtcaatgcagtcgcgtgaggatcatccataaattcctctttgaaatcacacactgaagcattccaaattacagtccaggtgcaatttatacaccaattcaagttgacactcgagatgcccaacagatggaaggatggggtggcggggctagcattggacgaccaggtgagcctagtgaggttgcaacaagcttcgtcttcttggccagtgcggacgcctctctatactgtgagtgatcaatatctcacaccttcaaatattcattattcttgttattgtggctaatatggggtaactatacatgtatagatgggcaagtgatgcattgttacccgcttggtgactaaatagtgtagggggtggtggaaatgttggagcactgtgctgagcatgtatttgccattggtatcaaatttgaattcaacgtgatatgaagtcagtacaggagccacggcttccctgcagtgagagccttgtcccatccctcatcattctgccagatagcgacgctctcgatctcccctctgcccagttttagtccattgtagagatgctaggctttatttcagcgaatgttaatttcagaccgacatatgcagcttactgggaaaagtccttcaccgggtcgaggggcagacactttcccgtctggggactcccagcggatatcttggaccacgcgatgatactcgatccgcaataaatagacaagtggttcctctgtgaaaaatgctttcaatgtgtttcccacctgatgcgccgttgagaggtggatgaaaccatcggcctcgtccagttcgctaaccgtgagccgctcagggattggttcgcgaactggtgcggtggaaggcacaatcttgtagatgtagcgaggttgagaaatcaacgaagccatgatgagatttatggagggaagcaagttaatgcaccgcgtctgtggtgatgatgagaagaaatcaaagttagtcaggtggtttcatttgttggcggggtcggttcaaccggcaacttgcctttcaaacgcgctgggattattgcgccattatttgtacttgtttacttatctctacttgttcaacactaaaatgaatttataacatatggaattttcaatgagtagttatcttcaatgctgagtggatagaaaaagattcaatcaagacttgcggggatatatcctgtagcatatccttggagaggttacagtactaagcatgatatttgtgaacgagaaaagccccagaaagaggcaagtctctcccaaactcaaccaaagcttgaaggaacagcaagtacaaagtacataattatgtatgttgtatattaattgacggtctatatagttaacttactgggtgacttccaaggttgaaagctgtgttcgtcgcacgggactaccacttttgccaagactgcagacatcctgataagtcagatattgggatttgaaggaatgttcggcagatcgattgattttctgtaagggacctttgcgatttcgaataattgcaaaatagaagtaagcaacagatctatgtccacctgggcacatgtgggactcgtcacaatctcttagttctgcatttcacgtgattcaagatcgacaagccacaatcacctgattgcgccatacccgatctggagatttgttgtgccccctgcgcccactttggggaatcttggtcgcacttgcacccccaccgtcaacaattccatcatcggggattcacgagtctagagcccattgacacaagtcgcgcatctattgattggattttcttcgcgtataagccatgggaggttgcccttgaacgctacccaatccagaacgtcttttccagaagaagtcttggagacctttaactcgcgcattccgcatttaccaccagagcagggatgcggtcaaaggagcgcgacatttttcaaaccatttttgcataccgtcctgagattaaatgatgtcgaatcaatttccatccctcaagcgggcccagacggaccttccctcacagtccaccagtccgttacgaaacgggtcgacagcgtccaccaactcgtctgcatattctgtcgcatcaagctcgtttattcctagccggactagcactgtctcctctaatgggtcggtatcaaacaaattgggtcactttcgagggaagagtgaggcaggcagtatgagctcagcaacgactgttacggacgcaatggaacgaggaagttggtccaatgcaggtacgacgtacgacaatattcgccgatctctacgaccactacaacaagtccctaatactccatcctcaactgcaaatactggcgggtaccgacattcacgaagccacacaattgatgaatcactcccgcggaaggactatcgaccaagtaccccagaatcgcgtcatcttaatctcaaagagaatcaggctccgcgtcaccaaacacacagtcacgaatctcagagccctccagcgcatatctctcctcgtcactggtctactgtgcccgaaacctcgcatccttcgtctccccaaaagacagtctctcatcccccacagctgactgctgcactgtccgcacccgagcttgaaaccctgcagaaatcatccaccggccatctcagaactctctcgaggtttgcaaagtccggtgaaaacgaatttagcgcagctgcagcctccgtagtaggcttgcaaggccgacgacgcctcaagcgagcggactcggtagtagggagaaatggcgcagtatctcccgaaaagccgaaggcgtcctcgtgggcggccgggaattggatggaccaacagcgacaattcatccaagcatacgagtatttgtgccatatcggagaagccaaacagtggatcgaagatgtcattcaaaagcaaatcccgccaatcgtccagctggaggaagggctgcgagacggcgtcactttggcggaggtggtacaagcaatgtatgccggcaaagcacttcgcattttccgacaccccaagttacaatatcgccattcagacaacatagccttgtttttccggttcctcgatgaggttcaattgccagagttatttcgatttgaactcatcgacttgtacgaaaagaaaaacattcccaaggtcatacactgcatccacgcgttgtcatggttgctcttcaaaaatggcatgctggacttccgaatgggtaacttggttggtcagcttgagtttgaacaccacgaactcgagaaaacccaaaaaggactggacaaggctggcgtgagcatgcccagctttgcaggtatggctgagaactttggcgcggagcctgaaccggaacccgttgaatcagaggaggatcgtattgatcgagagatacacgaaaatgaagcctcgatctgcgatttccaggctcaggttagaggagctatgatacgtttacagctcggcaacacgatgaacgatctgtgggactttgagccccttctcattgagctacagtcacgtctgcgtggagattgggcacgccaaattagtgaataccggctcagcatgctccagtttgcagtggggctgcaggctattagccgaggcttcattgtacgtcgcagtcagcaaggcgacgagcaatggcgaaaagcccaggaaacagatgttctgcacttccagagcttgattcggggatctagggctcgcgcccagactagtcacctacaaactcgcgcacgacaagaagagtttggcatcaagcagatacaggccgcgataagaggtacattgcaacgcatgaatcttggggaccaatacgaacagtctcgatatgctgaaaatgatgtgaaagcacttcaagctttgatccgcggtaccttacaacgaaaggagatcaatgctcgttcccaagagctaaaacaagctggcagttccgtcaagtcagttcaagcagctatccgtggtgccttacaacgaagagaaataaatgccttgtccgaagaggcgaagcaagttggaaagtccatcaagccgcttcaagctgctatccgtggtacgttgcaacgacggcagatgaataccctgtccaaagagacgaagcaggttggcggctcgatcgagtcgcttcaagctgccattcgtggcacgttgcaacgacaacagatgaatgccttgtcccaagaggtgaagcaagtcggcagttctatcaagtcgcttcaagctgccatccgtggtacattgcaacgaagacagatgaacgctcactcccatgaggtaaaactgacagaagcacccgtcaaatcgcttcaggctgtcattcgaggatcgatcacccgcaacaacttgtctcagatgaaggttctgctcaacaacgaaacgccccaaattgtctgcattcaatcaactctcagggctctgattgccagacaagcacaaactctgctgcttcaggcactagaggaaaccgaaaatgagtgtactgcactgcaagctatcgtgcgggccgctgtcgtgaggaaaaacacctcagctattcgcaacgagcttgcggaacatctattgccagtggtcgacctgcaagctattctcaggggacaagctctgagagaattattggatacccagaggaccgaattgctcgaagaagaaccttctatcttggaactacagtcccgatgccgtggcgtcattcacagacagtatctactcgcacagcggcatgaactgggccaggaggaacatgctattgttgaacttcaagcccttgcgcgtgctgctgtctcacgaatggaggttggtgacatattgtctcaccttgaggacaacgaggaagaagttgttcaactccaatctttaactcgggcaatgcttgcgcgggttgaagttggggagatcttgaccgatcttgaggcagaggaggacttcgtcacggacttccaagcacggatcagaggtcacattatctgcaaccgctttgaggaaagacgtcaacattacaatgaaaacatggagaaggtcatcaaggcccaaagtgttatccgagcccgcattcaagggcaggcttataaaagcctgacaagcggaaagaatccacctgttggaacggtcaagggcttcgtgcatcttctcaacgacagcgatttcgactttgacgaagagatagagttcgagcgcctgcgaaaggtggttgttcaacaagtgcgacagaacgagcttgctgaacaatacatcagtcaactcgatatcaagattgccctccttgtcaagaataagatcactctggatgaagtcgtcaagcaccaaaagcacttcggtggccacattggcaacttgctatccaacaccgaaatttcttccaaggacccctacgatctcaaggcccttaacaagacctcaaggaggaagttggaccagtatcaggtgtttttcttccttctccaaacccaatcgcagtacctggctcgcttgttccggcgattgcgtgaggtcaacacctcggacaaggaatatgagcggatccggcatttgatgatgggtctctttggatactcccagaaacggcgtgaggaatattatctcattaaactcttggcacgatccgccaaggaggacattgaaagcttcacatctcttgctgaatatttgcgctgcacctctttctggaacaagcttttcgcttcatatgccaagtcatcccgcgatcggaagttcatgcgcgacgtcttggggggtgtcgtgaaggagtctgttatcgacaacccagaccttgatttggagagtgatccaattcaaatctaccgttccgcaatcaacaacgaggagctgcaaaccggccaacgaagccgccgacacccggatcttcccagagaagaagcgattagagaccccgaaaccagagaaacgttcattcaacatttgcaagatcttcgtgacattgtcgatcaattattctcaggctttgaagacttcctataccgtatgccattcggtatcagatatcttgcacagcagatgtatcagaatctactagagagattctctgccgaggatccaggcttaattctccaggcggttggccactgggtatggaaaagctacttccagcctgctgtgctggagccagagaagtacggtgtgatcgatcggggcctcacccaagaacaaaagcgaaatcttggcgaaatctctaaggtcgttgctcagattgcatccggcagactatttggggcagataatgtttatcttcagccgctcaacaagtacatcggagagtcaatccagcgcctagggaatatctggggtcagatgatctcagtccaggatgcagagtcttatttcgacattgatgaattcaacgacctctatgctaaggccaaacccaccctgtacattaagatgtctgacatcttctcgattcaccagcttgtggcctctgagattaactatatgtgcccccaccctgatgacttcctcaaggaagttgtgcgagaacttggcaatgtcaagagtaacgagaacgaattgatgggcgtcagctctaccgagatcaatctcacattaaatcccaagttggcccagcttgaaggtaagcaattcagcaaagcccccgtttgttcatttttctaactctacatcccagaccccgaagccgatgtgaagacgctctttatggagactaagcgttgcatcctttacatcatccgagtccaaacaggttccaaccttatggatgttatgctcaagccgccgacagccgaagacgatgagcgatggcacactttggttcgggaagaactgagcacgaacaaccctcgccgaggcgcttactcggaagccaacagcttaattgacattggtaccatgagctattccgagctcaagggcattgcactcgaaaatattcttcgtcttgaacagactggcaagatcaatcgtcacaatcattatcaggatttgttgaatgcaattgccactgatatccgcaccaagcaccgtcggagaattcaacgagagcgtgaactcgagggtgctcggctgacctcccagaggctcagcggccaagccgtctacctggaccagcaactcaagacatacaacgactacattgagcaagccatgatcacgttacagaacaagaagggaaagaagcgattcctgatgccgttcaccaaacaatgggatcatcaacgagagctgcaaaaatccggcaagatattcaaatttggatcctacaaatactctgcgcgcaccctggcggaccgaggtgttctggtcgcctggaagggctacgccgagcggcagtgggatcgggtcgacttgaccatttcaagtaacgaagttggtgtgttcaccattgacgggagcagcggtgtcatgatgattcctggcgccaacgcacaggtaccgctggacgacttgctgcaggctcagttcaacaacacgcaattcatggacttttttgagggacagatgcgagtcaatgtcaaccttttcttgcatttgatcatgaagaagttctataacgagtgagaggcatggcttacggacttgatgagggatgaattgggtgcacattcttattgatattattatttgtctgttttttttcttctttcttattattgtctttgtttaagataccatgggtattttgttgatttcgatagcgatagcattcggtctatacgggcgaataacatgtacacagtatgataccattcagtatcaattgtaaaccaattcaattttccagaagacctcttaagtagaaagtagacttacgtagaataatcgtctgttgtattcgaagtatacagggcttggtcaggggttgccacgtgacgtggcgcattcaatcgggttgccagctggaaaccgggcatcttcctcccctccgactgtccacgttagtcctgagggatttttgattcttcctgtgcttggcttccaattgcctgtgctgctattatattttctctccgatcctcgtttctccatacttcccctgacgactaacagtcacccctcaccatggatttctccaacctcaaagatcaagtcagcaacttgtccttgtatgacctcaaggccggtgttcgcaaggtacagaatggtaagtctgaatcccgattggtccgagggcgttatgaacaagcccgaatcagcttgcatgtgtcttacaatttgcggaaactgatttggccgttccgtcatagctgttatgaactataccgagatggaatccaaggttcgtgtacaatcgctcacccctgcgcgaaacaacatggcctttcgcagggtgaaagcgaaaagatggtgcgatccaatgcttaccctagtcaggtccgggaagctacaaacaatgaaccctggggagcctcgaccacgttgatgcaggatatcgcgaatggaacgcatagctagtcagtccatgttatctgtcattacccgcaataatgcgcaagcgctgaccttctgttattacagccaattactcaatgagatcatgccccttatctacaagcgattcaccgacaaggctgcggaggaatggcgacaaatttacaaggtaagagaaccgtggttattcatgcgggtgtgcattgactaaaccttttttcctccgaatatagagtcttcagctcctcgaattccttgtcaagaacggttccgaacgagtcgtcgatgatgcacgatcccacatgtcgttgattcggatgctccggcagtttcactatatcgacataaacggcaaggatcagggtatcaatgtgcgcaaccggtcgtccgagctggtgaaattgctgggtgatgtggatcagattcggactgaaagaaagaaggccaagaacaaccgcaacaagttcagtggtttcgaaggtggcatgggtgccggggcgggcatgtccagctcaggttcgggccgttatggaggctttggcagcgatagtatggggtacggtggatacagtggaggtgtctacggtgacggcggcggctttggcggagaatctggcgggcaagctggcgttgacttccaggacaatggacgccggtccaaccgcttcgacgaatatgacgagtatgacgagggagatgccccagcgcgcccacgtgagtctatctcccgggcgaagccccaagcaaagaagcccgagccagctcctgcgcctgtagcagacctcttcgactttggcgacgacgagcctgttactaccacagcttccacctcgactggcaagcaacccgctggcagtgctctgaatatactagacccatcgccagttgacgacgacgacttcgacgacttccagtctgcaactccggttatccagtcatcaagtcagtttgccattcctcctccagcttccactgccagcacaacttcaaacacccaattcgttgcgcctcagccaatttcggcctcacagggtgccaacatcaacggcctagttggattcacatcggccagccccgctccctcttccagcggattcgccactcccgtttcgcagatggccccgattcaacagcagaagccctccgggtaccaagctcccacacccaactacttcacctccgtcaacgtggcccaatcttctggatcctctcacggtgccacctcctccatgtcctcagtggcttcacccacagcgaataagccagcttcagcagctgccaagaagccctcgggtgatgttttcggttcattgtggtcgaccgccagcgccagcgctggcatccagaaaaccaacaccggcacaaacaagggccctaaccttgccagcatggccaaggaaaaggccagcgccggcatctggggcaccccagcaccctctagcacggcctccacgcccagccagccccagcacaagcaacagtctagctcggcctttgatgatctgcttggttgatcagctagcaaagcaactcgtcgctcttacccactgagcccatgctcgcttcttaattttgcgatatggagtcatgatttcagcattcatattcctgatttgatttgatctttgttttattctgccttccttcattgtttttgtatactctattccattcccatttcttctctcccctagttggttccctacttccctacctagctagctatacgtacttgatttcctctgcggggtggggatattctatcttagctgccgccgctcttatgagggcgctcagagtcaggctcatcgagtaaatttgtgtccggaagtcacgtgattattcagtgagatctgataaacgctcactaatcgcttcttagagtcatctatgaagcacctactttctgatggcccttaatcttcactatgctcctcttatttcttggggtgtatgatcttcttattccgctctcaaaaacagcgcaagcatgatgacgcaagactggaaggcacaggggtttctccattccctatcgcaacttcatacatcatgggcttcgtcctcggtgaaaccgcatgcattgcggtatgttccagatcacccgacagctaataatacatgaatgaaactcataaggggtgtgtaaaaggtagacaaaatagcaaagctagcggcaagtctcaccgaagatgctatggcatccgacgataatagctcagaactccacattcacaccaatccccatccctcagccaccagatcatcaaggacagcactataagcaaagaccccatcactcagatggaaaaagccggacaccccacctgattcaacgtcaacgattggggcgccgcacacaccatcagagatagccctattaacattcccaaaaaagaaatccaccgatctggtatcccattcttcaaatttgattccgcgatgaccagctggacgtttcggttgcatggtttgggtgccaatattcatcatgctaaagagccctgaactcatgccgtccacttcactccatgagccttgggagatttgggacatttctaggaggcgagtaggtggttcggcttgaaagtagcaggaattagtgaagctagatgaggcagcgggtgttagtttgacgagagcgatgtcaagcccaggtcggatatcgacgacctcgccgataagatctcctccattcacaatgggtggtatacttcctctgatgagagaaaaccatgattggtgactgtcagcatttcttcgcccgcgagattgcgaattttgataccacacgtggttgcagcgtttgtggattcggttgaagtacctgatagcccaaaaccactctcgattctacatcctggtgtaagaaccaaccgcctaaggtagtttgagtcatcttgtggtgcagcaccagcagccgataccagagatgggacaataaagggagggcgggtaaggcttctcatggtgctagaaaacggttgatctccgtggtggtagagtgctgttcggcctgccacgacccgggaagggatcgcttttcgtagttccggccatctccaaactcaagttcgaagatagtccaagccgggagaaacatagcagctctcacacgagcaagtggcgcgatggcagtaagcacagcaactgcctgacgcttagtcggattggttaattggggccaccggacagtgggacagggatcgggaacacgaggattcgaatatccagataaggggattggctccctaaacatctcaccgggacgcacgaatatgacaggcatcgttccaagggtcagtggtataggctggggtggagaggccgtctccatacaaataagccacgcggagatgtgcactgttccttccccgaacttattacggatccaggtccagtcctgacctgaggggtggcggaacttgtggttttgctcgtcccaaagcgtgaacggcgccatgtcattcaagtgacgtgcaccccagccgccgggattttcccagcgtttctgttctgggtgggaatgggggagcagatcccgaagcggactaacaggcgcattatcatatatgttggtgtagggtgagctttgctgaatacactgaacatgtggggataggcggatcggagatgccatcggagttgccattacatatgctgactgctgatggtacaagctatgggatggggtaagattatgtactattccattaccggactgaacgagggacttggtcacatgaccaaaccacctgacataggcaggagcataattacttgaccatagcagagtaggttgcgaaaatttggcctctcatcccacctcacgtaaaaatattcgtcccccgcgatctcttatatacgcgcggcaatacctcgtttctgcgcattttttgtttactagtcgcgctgaaaagcaaacagtctcatatttcactgaagagtggtactactttatgtacggcggtattcggaactttaatgtccgatccatttggcccgcgattatattagaaatattatactggagctcacctatatacctatcccttattcacccaatggattttgcgaggcaaaagctgggttgtggtgatgagcccgataccttatacgataggcgtgaatgccagggtgaatgccaggtatcagttttgtatatctctaggcaggttttgtctcatagtaaattagttatatagtacattggcatttgataaagtcgtgtgtagacatatgctaaatagaatgtatcttataataagtggcaattgaatagatttgaatcggcatgatgccgatgctcattgatgctggtataacgcgtgcgctgaaggaaactaaatacaggtgagggaaaacgatgggggataataagagacatttgtgagacggaagaaagaacagataaggcgacaatatggcgaaaaacttggggtatgtagtagaagaaagattcttgatcctcctcaatcccaggttatgctcccccgaagtgtatgattagaagacatgaattgagatcgtgagaaagggatgatatacgttaataaagaggaacttgcgatgggtgatagttcatcgcagtaatgggttgaacataaggctggaaagaaagaggtgggtttatatcagactaaacagtccgaagagaaggtaaaagagaaaaatccttttgagatggagctctgaaaggtcttagagattgggtaattcgggtttggcggatgatccaccaaggaggtgctgattgagtgctcatgaaacaaccttcccacatagtcaactgcatgtttcataccagagatcttcccaccctgacaggaaagtggaggttgccaagctttgctgatcgactgtcaggatttcatggcgggttgcaaccgaaacagataagccatctctccaggtgaatcgtgcacggagcaccgccaaggcttttcatggacgaacaaagccatccagggctgatattcaattgtatcaagtcttgctcagcgtgctagagcgtttgtcggcgcccccagccgctttaccggtcggagtcccagtattcgtcgcagattgagacgcatctgcgccttccgtcgaaactgcagcgagggaactatcatcagtggttttgtttccagactgagcgctcacagcaaatgaagcctgctccacctgggtaggagtagatatttgttcagactcggtggagtctagactaacgtctgcggccccggtgacgtcggggtttggttccccattcagcgacgtcaagcctccttcgatgtctcgcaaaagacgcacaaattcctccgggacaaggccattctcccctgtcttgggatcttctgcaaccagccagccctggccatgccggtacgaaacataaatcacctggccctcggtaagaggaagttcgttttcatgctctcgtgtgaagtcaaagagtgcgacggcttttccatgcatctcttcatccgggcagccaacggcaaactgataatctctagagtaccgattatcaccggggttttcatcttcggactcaaacccagggtcatgttcatagccctgctggccggccggggcgctatatcccatggttgaatagcggccttcatttgccggatatgtcacatactcaccacctggtccatcatctgacgtatctccatcatttacataataagtctcactgccatcggggttaatgccaacgagcattccgcgatcactgttcaccgcctggccagttccagacatgactctctcatctacaagaccatttatgtcagaagtcttcttgcgatgacgcgacgtcacaactgggctatgcaggtcttcatcctcgctgtatggtggtccatccccaaaggacatggctggcaactgttggtggacataggtaatctgaggttctatgcccgattggcctgttgaccatccgcgcgatatatcccaagaaggtgatggatcggagaggcgtcggtgttcacttgccggtgtggagaccccggaggcgcgaggaggaggaggcccgtaatgcaggggatgggtcgacgggtaggcgaagtctcgcacaagagcatatggaagacttgtatggaaaatggggaagacatgggagcctgggcgcgaacgattttgtgatgcaaatgagacattggaatacgtggagagccgatccttcggatgcgtcgatgaccgtttcaccgtcccatcggtgaggatgggtggcaggactgagaggttgtttgtggaaataatgttctgcgatgatgtgggagaagacatcatggttgacatggagaaagacccaggattgagttcgggatgatgaataacggggcggatcttagagaaggaaatgtggggttgttcatcggtcgcgtagttggcgctctagtttcgcattgcgattgatatggtccaggttattgaatttgcagtcgcagtcgcagacagctggttttcctttggttcaaacaagggaggtatatcttgtgatcggagatagaggagatattcggctcgaggacgatgtagtaagcgcccaagtcgtaaggggtcaaacccgattttaggttcgcgtaattcaaaccaggggcaacccttggatgtcaagcttttgaagcaaaaaaaaaggatattatccccaaggggctccggtgtggtggacggtgaatgggtgggtaatcggcaaacgacacgagggaggggggcaaatgtggtccgagtggaacgccgaaccgcgacggggaagatctcacgatgagaagacgatatcaacaagagaaagccggcgattttgcaagatttgcgtagtagaatatccgttcaagggctcaaggtgggattggcaaaatcgagactgttgttccagcggtttgtcccgcaatcttgagggtagggaattgctaaatatagtagcagaaaactgcagaaaggaccaatgtcagatacgaatgtaacggaggcacagcgcttatgcaggaaagaatgtgcaaaccacacggtaacaagtgttttggtcaaggccacatgggaaatgggaaatgggaaattagagggagaaatagactcgcgagtgaacgctcggagattgccatacctgtctaagttgtaggttgaactggagtaatgatcagcgcgtagttgattttgggatcgggggactgttggttgttgggacaatatgatttatccgatggactgcagcaaaggaagcagcgtgaatcagccaatatgcaaggcagccgcttgagagtcacagagttgggcgtgtgtgaatgggtgaagcttgaacccgtcgagcagtcacgtgccgcccagccttagcgcgtttcaagtctggtttcgtctattcccgtttgggactaaaggctatatataagattgttctacttcgatgcctccatgttctgttatgaatgcagggtatctgagacatagattcggtttacaacgggataattagtttacaaacaaagggattgtcatttcattcggatattcagtcgctttgttctatcttggatgtttggtctttcaacttcattttatgtgggttgactcccagccataaatacagtgcttgtgctgatctcccaatctgtcactgtgactgttttaggctgaacccctgtcgcatccaaagatgtgccaaaggtggtcggctgagaggatagctgagaggacggaacgccgagtgcatcgaactgcgaaggaatcgcagcattgttgagatcttggtcagtctcatagtcactcttgactgcctgcttgctgattgtggtcaccagatccacgtccatacaagttgtgtagatctcggcctttccattgggatacgtgggatcaacacctgcagcggtgggccaattccacacccaatagagtgtgtatggtttcccactgggagcattggagggcagtcgaatatcctgctgacaccagaggtctgctcccatcagtgggtctgctgtatgagtatacgtcgcttgtcgagtctctgagatttgccccgaattgacctggtagcaacggccatcgtcgtagttctgcaccgacagaagcactccccgtccatcacctcctgttccatctttggtccaggctccataaacatcaaggaacttctcgcctgtcttgggctgtgtggtgccatatacataaacggatccccggctcgcaggctttccgggctggttctgaggaagtgtcacatggccgttttcttggtagcgaagggcaattgccgcgccagcgctggcttcaagccgagggcttccctctgactgagtctgatcctgctgagtgtccttgcacatcttgtcggttggcagaatctgagttacatttgcccttgtgttgggtgggatcaagtaggtcattgcagtgtcgctaaagcccgatgtcgtgcgcaggtagtttcctcggggatatcctggagtaccgacgaaggttccattcggagcaatgagagtgagctcttccacccaagaatgagcgtgtgttggggtatacagagcaaagagcactatcaaaacaatgatcaacatcgtgatagtagttttggatatgtaggattcgaggttaaagtttgtaagaatgaagttttgtggacttgaaggggacgagataacggcgaccggcggcgtcaaatcgagtaggtattgcagtatctctttctttgggtataaagatttggaagaagctgggagtgtgcaagcgggaagtgccgtatttattgagtctagaagaacgatgaagcggccaggtcgaaggctacaacaatgggctttgtcgagatgaataggatcattggaatgatagacctgtgactatgagtgtgaatagacaatggctctattcttaattttacaccaaacacccccaggccgcagcgaaaataaggataagaatagtataaaaaggtttcaagggaagctgttacacataaagaaacccttgtccgacttcgagtctttgagtctaattggagaggctctataccctgtgccaacccgtcattgttacaatcaaggctgttaatagacaatacaaacccaatgcccccagggcctctagacaaagcaggggatgattgggtgagagagaagatatttagagtcgcagaatatttcgagacatgttcggttccgctcctggcgcgtagccgtgatatatgcaagactctaggtgctcgatcttccaagcttgcaagtgtgttacaggtctgcaggtccgttggcccagcaagcacggccattggctgattcgggccaccctgggcgcttcgccgtcagagtcgaaattaacgaagaccctctttagcgctttggctctttctggatattattctgtttgctttttgccatttcatatgaccacttgctatgatacctctggctctgaacgacttgtagatttatcaaagtatcacaaaatatatcagacattcaccaacatctcattaattaaaagggggcacggtgtgccaacagtatcttacttttttggagcctatctttttgagaagtctcagcttgttgaaaaaaggctgctatgtcgatgattttgcggagcgaagcgaagcaattaaaaaaaataaccctctccccttcccagggggggtcgaatggcccccggagggaacgcctcgaaaggagatcatgtgaccaggcgctctctctactgggtcgaaaaaaatagaaatccagtcggtgaaaaagtaatcgctgagaaacggcagaatagatccagccggcagaaaaaaaaaaagcaatcatctagtactctgtactctaaccctatccccttaacataagatcctaagatccttaagcagctcaaagatattaaatcaaaggagcatattattagagggggcgactcactctcctatttctgtctagttattaggtggtcaattactacgtccacgggtagccactcatataaaaggtacatataccccatattatgtactcaaccctttggctagttaaaggagaaataagagtatgaatcaagaataaatttatagttgaattgattggctaataaaaaaaatctcggatatcttatatatagaagtgacaaaatctctattatgtatattttatatttatgtaccttttgtgtgggtataccatataaaagatacctaaaatcccaaaacttccgttatgtggcaatcttctgttatgtgggacagacccatacctggaacaggtatgggggcggtaagacggctattcttatagtcagatcgggaaggcactacatacggggtattgtttgctatatattgctatataaatagatcctccccccaccgctgtctctctccccatccacttcaccattacctttggaatgctacccagtctttctccctgatcgaggccatccttgtgtagccatctctggaaaatgtctctggaaaatggcaaatccaatctcattctcagaactcctatgagaaatgcctcctccaatcaatgacgggtcctcacacatggcaaacagtgccatccctaggattgaatatgttggttcccttcgcccctagccaccttggtcaactacgaatactactgacatcatataggcgctttcatatatcccaagatcgatatcagctcttcatgactgttgccaagtatgacgagaaccatctcaagcacccgagcgataaggagcataacatgcaacccatcataactgtctcttcagggttgcagcccacctcaatgacattcgagcacatgatagctgttgatgagcagcccaagaatgtgttggtgaggttttgagtgccgtgttcaacacgaaacagttggatttaggtttcgcagattctaaatgcagagttaggctgccggagctaccattatctggaatcatgatacatccaagcttatcgggtagtcgaccagagctatccggaggatcataaaaaataagaggaacttcctatcgaggtggtgagagcaaaacggtcttaccgttcttgccggatcattttcctccccattatgggtcttcagtggtccctacaaatcctgcaaacccttgaccaactcacttagtaaaagcgataaattacaacatgatatttcaacaacggttgtctatatgagcttttccttctagtctaatgctttttatctgatatctagctacttactggagtttaaagggatttaataaattagtgactgagatatatatatttctagggttcagcgacgtatttttcgataccataataatgcaagttctcgatttattcaaaactgatatatgatactacaaatgcttatcaattgctatcggcgagtaataaaattaaaaaagagcgttggttgttgaaatatcatgttgtaatttgtcgcttttactatgtgttctgggctgcgcagctcgcccgggtgcgcagctcgaccgggaattacgttaggcctagtattcccttgcctgaacgactctattattttgctgttcgctcagcaaaataacctaggctaccccctacagtaggtcacattaggacagactttggttcgtcaacgctcagcaaactataacccgtatgcgtcaccaccccgagtggtcgcttataggtagctggtaatgtctgtttcatttgttcttgtccccctttatcatgaccaccccttatggcagttggttgttcccaaatctatgagcacatgattgtcgcaggctgaccctgacattgtaatctactaatacgattgcgaacacgctgatcaaaatacaggacaatcccaactacaggcttacataatgaatggggagtgcccagatgccccccaggcccaggtttcaggaggtgccacccggcgacccctggcttagggcccagtccatggggttcacttggtgatcaaaaaagcagcaaaaggggagtaccaacaagcatcagagagcaccaataccataggaaagccacttgaggccacccaaggcacccaaggcacctcagaaagtgagaagttctgcacattcccaagaccggagtaactcggcatttaccaagtcaacgatctaatctttttctctttttcacttggcaagctcggttaccgagtttattatggatatatggagtctgcaccgggtcaatccgagaagatgatttgactccgagttatcagatttttatcagatttttatcagatttctccgtagctccaccgggtggattccatctcactggtatgagagaaattgggtggactctttttctgacatggactcgcagattggatgcccagtcctccgtatatccctcgacttccctcttcagactaagggaaatgtggctgacgtggacggaacaaaacctcatttgaataatacagggctaataaccctgaacaaaacgagtggagcctttgttgcttctctcccacattctgttttgtatcacgtaaagatgtcaagatttgagcaatatagattgaatgtcttcctaaagattcctaattcaattcactatgtatagtgtgcaacatggtatgctgtgtcccatgtcccatgactatagttaaaggatcggcgtaaatataaacaaatgcctgtgcattcaatagctccaattccttgggttgtactttgtactttgtctgttgtaggcactcggtacctacctacttgggcttttgttcggtgggaattttctctaaagggtctactgcatcacccgcggacttgaattgccatttacaaatactatgttattcctccatatcaccctcttcaagccattccgctatatgtagttctttatgaaatattgcagcctggatcgtaatcgtggaatttcccctccatgtcagcttgactcgaggatccggcatattattgttctgcccattcttccaaggttcctaacgcttctattatttattatttattctttgttctcgttataaaataccaagattctccaataataaatcgcctcgctggaaacccgaccaattctccactagctgaagtcttggcgaccccgttgtcggcgatacttaattccagcggtctcgggcacctattatttcagcttcagggggcccttgcttttttttccctttacgacctccgattccaagggctgtgccttgagctttctttacttctcccctcggtacgtattatttttttggtttggaccttggtttctgcaactaagagaagaaaaaaacagtagcccggaatcctgtccagtcaacatcgacttgtgcagcccatatgcgctcctagaattagatcttaattcaaagattttctcctcaggattggttttggtgtaaaacatcatcccacgacggctttcctcgcaggttctggtccttgcggaccgtcttaaacacaacgccttcaacagacgtcctcaccgcttcctccgcgactagtcaacatggctacctcgttcatcaccaaacgccttcgctcaaacgaggaagagcagaatactcaacccagctggatccggcgtcaagttgtgtcaggcctccagtttatttctcaccgggcctgtgtgcaccctattcacactcttgtggtgatcgccatccttgccagcactacctatgtgggtctgctcgaaggcagcctgcttgataccccgaaagactcgttaagtgtcgcgggacaggtcgacaccgatgcccttctccagggaagtcgaaatctgcgactcggagaatcaacttcctggaagtggcaggcggaagatgcgtggactgacccccaggtgagcccatttcaccccaccgttcttcttgggcgtcgagaatgatatactgactcaatgaaatgttagaataagaagcctgctgcccagcacctggctctgacgaccctcatcttccctgattccaccaactctgattcaactgccccggcagctgatgatgtcccgattcctgccgatatctccgccaactcggtaccgtacaccccgaacctcttctcgcattttactcatgacgcttccctggtttacaccgtgccctttgaacaagtctccgaacttttgagagctgtgcaggagatccctgccccacccacggatgggaatgaggtggaatccaagaaatggatcatgagagctgctcgtggcccggtccacggatcccgcagagctgtaaagctctggatcgcggattcatggaattcctttgtggatctgatcaagcacgcggaaaccattgacattgttatcatggctcttggctacctctcgatgcacctgagtttcgtctcactcttcttctccatgcgacgattgggctccaacttttggcttggggctaccgtgctcctctctggcacctttgcattcctttttggactacacgtgaccactaggctgggcgtgcctatcaacctcctcttgctgtctgaaggtcttccattcttggttgtcaccattggatttgagaagccgattatgttcactcgggccgtcctgaaagcttccgtggacaatcgccgacctcttcccggcgctgcccctcgcccgctggcatcgagcacaccgaggtccatccaggactctatcgcagctgcgattaaggaccaaggttacgagatcgttcagcactactgcattgagattggtctattggctttgggtgcggcatctggcgtccagggtggactccagcagttctgcttcctcgcagctttgatcttgttctttgactgcgtgcttctcttcaccttctataccaccattctctgcatcaagctcgagatcactcggataaagcgtcacgtggcacttcgcaaggccttagaagaagatggcattacccacaccgttgccgagaatgtcgcttctagcaacgactggcctaacgccagatctggcgaggcggacaccagcatctttggccgcaagatcaagtcgagcaatgtgcgccggttcaagattatcatggttggtggtttgattttgatcaatgtcgtgaacatgtcagccattcctttccggaacaccggcaacggtggcctgctctcgcgtttctccaacgtcctgtctcctacccccatcgatcctttcaaagtggcagagaatggcctggatagtgtgtacgtggctgccaagagccagaagcaggagactattgttaccatcctttcgccgatcaagtacaagttggagtacccctcagttcactacgcagctcttaccgactctggttcgtttgacatcgagtacactgatcagttcttggatgccgtgggtggcaaggttctcgaaagtctgctcaagagcgtcgaagaccctgtcatcagcaaatggatcatcgccgctttgactctcagcatcatccttaacggatatcttttcaatgctgcccgttggagtatcaaggaccctgagacccttcccgagcctgtgatcgcaccgaaggtctaccccaagtttgaaccaaatgaacaacagtcaagaaggagcgtcgaagaatgcgagtctctgctcagggcaaagcgtgcgcccttgcttaccgatgaggagctgatcgatctttccctccgcggcaagcttccaggttacgcgctggaaaagtctatggaggatgagaacttgatgagtcgtgttgatgcctttactcgtgctgtgaagatccgcagatctgtggtctcccggactcctactacctctgctatcacttccgttttggaaaactccaagctcccctacctgaattacaactatggccttgtccacggtgcttgctgtgaaaacgttatcggatacttgccccttcctgttggtgtcgctggtcctctcaatatcgatggacaaaattactttatccccatggctactaccgaaggtgtcttggtggctagtacaagtcgtggctccaaggcaatcaacgccggtggtggtgcagtgactgtgctgaccggtgatggtatgactcgtggtccttgtgtaactttcccaaccttggcccgggctgccgctgctaaggtttggatcgattccgaggaaggccggagtatcatgacaacagctttcaactcgaccagtcgctttgcccgtctgcagagcatcaagactgcccttgccggaacctacctgtatatccgcttcaagactaccactggtgatgccatgggtatgaacatgatctctaaaggctgcgagaaggcactggacgttatgcataaggagtgtggtttcgatgacatgtccatcatttcgctttctggtaacttctgcacagataagaagtctgctgctatcaactggactgatggccgtggtaagtccgtcgtggcagaggctatcattcctggccatattgtcaagagtgtccttaagagcgacgtcgacgcactggttgagctgaacgtcagcaagaatttgatcggaagtgcgatggcgggcagcttgggtggcttcaacgctcatgcttctaacatcgtgtctgccattttcctggccactggtcaggatccggcccagaacgttgagagcagcagctgtatcacaaccatgaagaagtaagctttatcatccgccactttttgaccattgagatgctaataatgatttcctcaacagcaacaatggcaacctccagatcgctgtgtctatgccttccattgaggtaggcaccattggcggtggcactatccttgaagcgcaaggtgctatgctggatctcctgggtgtccgcggtgctcactcgacttaccccggcgaaaacgcacgccagttgtctcgtatcattgctgcctccgttctcgccggtgagctcagtctctgctctgcgctcgccgccggtcatctcgtcaaggcacacatggcccacaaccgtagcgcagctcccacacggtcctcaacccccgtgtcttctgccgttagcgccacccgtggcctttccatgacctccaaataaacgatgacatgactcactcctcctggcccgcagctgtaggccaatgtaaatgtgtggctacgacccatgattcttccgataccattcactttcaagactctttggcgtacctaccgctcgccttgtctttgcctctgcattataatgggagaccatctcaactgacagtaaaaaaaaaaaaaaattcaattactgacgctatccggtctccggacaggccggtattgaagaatcattcgatgccaggggatcagcaagatccaaatgaggcatactgaaggcatctcccttgggagcactataaccaatgcttcaaagcattcatgcgtgtattgaagctgttccacattgtgtacttagttgtttcggcatttttttttacattttacacttcccattcccatagatatgaccgaaagaatttatttgttttccaggcctagttctcaaataatacaaggtgggacccgtggactgtcggttacaacatacaacatacaaaattatacggtgtacaaaattatggggcaaggcaagggcctagaatcgtcaactcctgaattcttctcatttggatggttctattattaaatttgatatacggagtagaaggtaagtccatgtagatatgtcaaggtcaatgtctggatatgattttattgaacatgtttaaagttagctacattacttatagatatgtaattcctcgatacattctagtacatagatgtgtacgaagtagtaactatgtagtatgctgtgcccctggggagttcccctggcccgtggccttggcagggagaggtatagaatacaagtatcatatacgagtatagccacttttcgacttgactagtgatcttattattgatcaagctttaggaaaacgatgttcctggggttatgcagtcagccaagtaaaaggaatacataaaaaaaaggaaagaaaaataatgcgcatcagatctgagatcataccctcacgcataaatccctgtagatgcatacatatagtagcgctaatactgtacggccccggggagtaaggaactcgaagtaacagactggtattgccgtaagggaactgcggagagttcagttactaaaaccactttcgcactttcggtttgtcccttttccaccatatcagtccagtccttcactctttcggatctggtgctttcgctgttcgtattcttcgactatttacgactccctcgtggcgaatcacgactcctcacctacctccggttacattgtctcagattgggatcttagtggagaaatacaggggatttcgttttttttaccgtgacgaagtgaatgcctttatcgattatctgtgacagctggccccgtcggacagcgagtgtgaatattcaatagtgagaaatcagaacacccccagtttgagcctgatatgcatgggggttcgggagccatgtcgcctgtctctgttgatggtagcgaatggtcgggactaaatcagtatggaaagtcggacgggccattctcaccatcatcgcgagccaacctagccacacctccgacctccggcgtcccgagcgtaccgctaagtcccagtgggccacctccttcgatatcaccctccatccgaagcggtaacccatccccgcccagctcagtcgccgcaagatccagttccgggacactaggagacggcccgcgcgatggaagacgctatcgtcagatggaggagatcctgggccagcactacgtggtcctgaaaagattcctgaatggcacagcccgcgacgaccgtggcaagtcgaataaagcccgagataaactgctgcggctatcgccaacccagttccatgaactttccaccgatgtttacgacgaattgatccggcgacagcaggcctcgccgcctcctggacggccacctcgtacggacgtgcctccttatctccccgctcgaagcgacttccacgaaaagcgcaaccatgcccgccaaaagcttgctgcgctccaccacgtgcgcttccgagatttggcgaccgatgtcttctgtgagctggagcgccgcttcccgcatttcaccagccgagattaccgcgcccgaccgcctcccaatatgggccctggtagcgctcgcacctcgcaacagtctgctcggggtcctcccccgcatatgggccgcgggtacccgtctggtggtcccccaggcagtccgtttcctccgcgtgctggctctcttgggggcccaccgagtataaatggcgatggaccgtttcctcggtctttccagagcaatactatggtcccgaataagagcacgatggtcgaggatagcgatgatatggggccagatgatgaggatgatgctcggagtgatgcgttcgctctagatgctctgagccgacggggtactacaacgaccttgggtgagagtgagcggagattgttattagaaagccagacacaagtatcggttctccaagataagatcgaaaagttggaagaattagtccgcgccaaggatgaagagttggcccagtcatcacaagatgcagattcttccgggatcagtcataacgaacgccaggagtgggacgagttacgacatgatcttgagagtaaggtatcaaaagccgaggatctcaacagctcgcttcagctagagcttgagcgggttagaaccgagcacgagactgtggaacgagatcttcgcagtcagcttaatgactcttcccggggtgtcgatgatgcgggtctacaagcgcgctatgttgatctagagactcagcaccagaacttgcaggcagagttgcagcagcagaaacaggtgaccgacgaggtccgccgcgaggcagcggctttcctgacggaaatgaagactctttcagccgagagtcagtctaattgggagcgcgaagaacagctctcgcatgaggtgcacagactcgaggcagatgccaacgaatggaagcatcgttatgccaaggtcaaggcgcagctgcggcatcttcgcacgtcctctggtggtttcgccgactcgcggcccgacgcaagtcttgtcgccaaagagcatgagttggtgcaagccgacgggttggtcaaagatatccatgttactaagttccaggtatctgtggacgagctcctgcgagttgcgcgtttcgaggaatcgcatgtggtgctccaacacattaagatggtcattgtaacagttcgccatattctgcaggacgtggagtattcctcgatcccggtggatgggtcggctgctctgcgcgcaaaggtcaagggccaggtgtctacgacagcaaacaacatgatcaccgctacccgcaacttcgctagctctggtggtttatccccggtgtcgctccttgatgcagcggcctcacatctttgcaccgctattgttgacctgatacgggtggtgaagatccaggcatcgcctatagatgagctggaggatgaagattatgaggtggatgtacctcaagaccaattccccgactattttggtacatctggcagtcaaaagcggatgagcaataactccgtctacagtgctattagtcgtccagatgactctcagtaccctgcgcagaatggcgcgactaatgacctcaatcatggctgggggcatgtgcaagaagatcatgaggtgttggaacttaaggtgggtcgaccggagaaagataataccgctcaacgaatgatttactgacggatgatcctagctctatgtcgaggaccagaccgatggcatggtccaacaaatccaggctttggtggccagtatccgagccgaggacaacctgcaaactgttcagacgcacgtatctgccatttcgaacgttgttgcgaatgtggtatccgctacagagcagttgatgcgcgaacgcagcggagacatcactttgcggcagacatctgaaccagtcatcgcggcattggaccagtgtcgcggccggttggcggccactgccggtgagggccaagacgccaccaccccggagcaattgcatgagctcacgaacaaactgcctcccattgcatttgagatcgctcggcagatcaaagacctcgttcagcggcttgaggctacatcggtggctactggcgaggaagatgacttccggtaaatgagcttaaccgaagtattgtttttcatcaggtgaactcggagctactcattttgtctttctttcccctcaaattcttctttatattccttcctctttgccccttgcttttcagcgactatttatctatggcaacgagcggacaatgtcgaaacgatgtcccgacatgtgtggcatttatgggctttcctgcccctttgtcatttctcctatattttcctattctttgtactttattttagcccttttgtattgatcatctaggtttttcggcctgatttcatgttgattcgtgcctctttattttatctcacgaccgcttgctggtgtcgggctatcatttctttgcatttggatgcatacaaaatgaaagtaccctgtacatcttcaacataatgactataccaataaatcaatgcaagtttccccctcgaaagatgcatgtcttcttgtagccaagattgctagttcggaagggatatcccggaagacattacataatctcggagctctagacgccttttggcgttgagcttcgtttttttccttctttctacttctttaattcgcattcctcatcatctatatcctttgtaagtgcgattggtcccttttcatctgaaggatagagaaaatatccactttgcttcagactctttcggagacatcattaggcaacagaggcagtgatgttttcccccttggaagtctggagaagctccaaagtggagcctcaggcagaaactgcacaagtggtctttaagtcaaccccagcaagctaaccccaaagtagcccggcacccgagttcacccgctccgccctgcccctcaccatgttctgccgactgaggtcaataaccccaccttcttccctcttctcttcttccctcttcaattgcacttctttccaccccgctgcccgatctttcgcttcatcaaccgccgctatgtccacccccaacactaccgctttcttcgaggtccagtacgcccctgctggctcctctacccgtaagttttcctgttattctcgtttccggcggggcagggagtttttgcctccgcgctccagcctcaccttgctgtctccaaccttcagctttcaatgctagcatcaaagcttggaggtttcacatcatgtctcagtaattggaattgaaattgatgctaactcctcattagccaagattggccgcatcaacttcaagctctaccccgacgaggtccctaagactgccaagaacttcgctgagctttgcaacgccaagcagggtgagggctacaagggctcttccttccaccgtgtcatcccccagttcatgctccagggtggtgacttcacccgtggcaacgtaagttttctaatcctgacaaccgcctaatgctcggtatctgattttgattttaccggaatagggtaccggtggccgctccatctacggcgagaagttccccgatgagaacttcgtccacaagcacacccgccctggtcttctgtccatggccaacgctggccccaacacgtaagtctcagtcttgtatcccggctggtctacatccagagaaccatactgaccgtttccctcttttctagaaacggctcccagttcttcatcaccactgttgccacctcgtggctcgatggcaagcacgtcgtcttcggcgaggtcgctgataatgagtccctgaaggttgtcaaggagatcgaggccctcggctcctcctccggctccatccgctccgctgtcaagcccaccatcgtcaactgcggtggcaactaaaaagctcattctggagatttagttgggtgttgggaggatgaacgtctttcttttcgtcatggacttgcttctttcccaacgctctagtgcggcgtgggactagcataggtggctttcccttttgcgccttgtaatctaaagtttctaccaagctagctcatacattcctatctgtcgtggggacttaatgttcaatttgaggattagtagttttgtaagagcgacttttctagatattacctttgagccaagctcctaaaacctgcatgtcaacctaaacatatttcgagtcaatccacggcaaagcacgaaatcatccaggtgctcctattgccattccttcccaggtcttctcccagcaaagaaccccacgtatggtgtggtggttcgatcactcggcggggtctgcggctaactacatcaccttaccccgcgtgcggcaggttttttttttttagcggaaaacgtttccaccgcctccaatagataacctagtaccttggtagtcagatgatattagtaatgggtgatgcatactctactgtaagtctgtttcatttattgtgagagggcaattgagtagagagtaatcgagatagaagagatggttcatacgtcatggcattacaggtgagaacaaaagacaagaacagaaacaaggaggaataattgtggacacaagcaagtgcatattaccctctgccatttcgagacagagaaaacaaataccggggatatcagacgcatccagagatgctggtgtagaatcaaatcgtaattggaacgcaagtcaagacaacacaccatgcccaggcatttaaccacagcacttagtgacagacgtagcatctgacctgaagaagaaagaagccatgttagccctggtgaaagtatagtagttgaacgaaacaacttactccttattcaagtccaccggctcccaggagaagatgaacgcgcccaggaaggcaccaatgaagatacagatgatgatatacccattgaagtacatagcgagcagcatgatgatgtacgcaacagcaaactgcgtcatatgcagcagcgagcgcagagaatgctcaacaagcgacggacgatacggggcaagcaaagcatcctgtctctggccgccgacatcccgaatgcaattagccggcgcagcagcagagacagaagccttatttttcgacactccgttctggggagcacccgacacaggagtgatgatgtcgtcgtctgcggaggacctagcgtcgatctctgcgttgccgccgcagcagttgccgggcggcttggtggtgtctgtgtcttcttcgctgcgcagggggacgttggagatggattgcgcggtagaagagtccgacatgtagagtcttcgaaggcgggctcgacgcactatgaaggagtcgtattctcggcctagacggcggaggaactcaaggctcaatacgaggcagatcactccaatacaggagccggcgaacatgccgcgcgtcctgatgtgccatgttttggcgaggaagcctaggttggtttagttggctttatagccttgtgcagagggattatagctggggctgcgtacatgagtcgattgtataccagttccaaagcatctgatcatgactgtgagtaagcttgaatccatacaaggtagtgaatgtgcgattgatattagacggaccgatattttgcaactatgtcccacgtccgctttggtggcactggccatcgctgccgaggctgtggcagtggccgttgacatggtcatcccgcccatatccatgattgattgttgattggggaccttaggagcactggatcgagatagtatcgtgttgattgaaactgaagggaagcagtacaaaataaatgcaggagtagaatagaagagagaataggagatagatagaagaggggagcacttcaccgtcactctgccctaatgggagcaatatgagcaggtttatagatttggccctaaaaacttagcggcgaggtggtttgagcaaattctcggatttgggctgtaactggtaacattaaacgtaagacagagggtatcaacttgaactattctcccgtttgaatctcctttttgattttgtttgttttttgatttttcttttttttttgcgtcacccccgagatcctttgatgacaccttccaacaactcgcggatctgactgcacccatcgatcccgaccgccaacattgtctcaaggtacgtagcatgcaccttagactccatagtaagcacacacaccttcattgcctcttcatcgtcatccatattgttctcgccaacgggcaccgctgtcgtcgtcgcaacagtgagcgaaggcagttcctgttcttctggaagagataggtccagcagtgggtcaagctcgtcgtgtcgcgggtcacgcggtgtagaggcgctaccactcattcctgcagtacagccacagagtagtcctggcatagggattccggcgtccacgagcgctagggtacaggcattgatcgccgcggcgagcagtgatccatcggcagatagaacggagatatgaatgctgattgtgctgtggggatagaggtaggtgtggaggtgagactggaaggttgagcggatgattgtaccgattcgcgttgattgtctgtagtccccaggagattagcattggttgtatctagtctggtgctactgtgactatttccctatagcaggaaggtgcaatggggaagcgtaagagggtgcatacctatcacttccaccggctctccgcttgcgatctacgccggcaaacccagcgacgttgacatccacctccacaactgcatggccacttcctgcagcaccactatctcctcggcgaccctcggcagggccgtggacagagcacatgattgatgtgttgcccatggacaagtatgaggagcccgagctggcggggttggttgagatctgagcttggagcaggcggagttcattccagcgacggccatcaagacgaagccgcgtcagagggtatgtcgtcgaggtgtctagcggcatctttgcggctttctgataagaacgagagttgtcttgagcgaaaagagggtacgtcaagcgggaagtcaagctttattttgtgttttctgtgggcttaggtcagtagggcgttcctttatcgagcaatgacagacgtagaatattgtcttcgacttacgttgactttgtcgcatatgcaaagaatcgaatgccaaaccaatgagagcatctttttctctggttctcttgcacgtgaccatgtcgaccaactctataaatccagaaagaaccatttcaaccacttctttgagcatttaggagatatcaacagagacccaattctttttgagatagaataaaaagcagtttaccacgctctatattgaaggatactcaattgaagctttcttgggcgaacagtttcaaattcactacgtggccgttatcgcgtgccgtacttgacgctttgtcgcgacagtctggtactcccttcggcctacgctctgtcactatttgagtcgtattttcagaaatgcagagaacatggctaataacgaggatactgacgaggccatcatcattgattcagatgatgacgacttggaggtgacgcactatgcaactccgaccgctaggggtatgacacctcttcgacgcgtttgacagacagctcacattctctcaagacagattttccggtctgaaacacggggctgatacaccggttaaacctgaatcgtcgcgcactcatctttccgagtcatcaagtgctgtaaagatccagcccgtggacagcgatgaggataataccaacgatggcgagctagcgtacaagaagttcaaggaacgcaaatccctcaagcgcaaacaagatgctgcagcaactcgcaaagccaaggcgcccaggagagatgcaatcgttggtcgaataaaacaagagcggccaacgcctcggccaaagcggccgttgaaacaatggggcgaggtatcttcagatgatgacctaatggagaatacattacctggatacctcaaaagccgccgcagccagttcgaccagaagctcgaacatctgaaagatcatggactgaagctaccacccacctatgaggatgtggacttctcggatgatgaacggcttgaagaactgcaagaacgacctgtctttccggataatacccgaaagcaggagtacaaggacatccaacttccctattcgatgggtattatacccgccccgatcgcccagtggttgcggcagtatcaagtggaaggagttgcctttcttcacgagctgtttgtataccaaaagggtggcgtcttaggagacgacatgggtcttggaaaaaccattcaggtcattgctttcttaaccgctgcctatggaaaaacaggagacgaacgggacgcaaagcgcatgcgaaagatacgcagatcggacgacagcgcttggtatccacgtacactcatcgtgtgcccgggaagccttatcgccaactggaaggctgagtttgcgtgctgggggtggtggcatgttgaaagctaccacggggataacaaggaccttgctctcgatgcggcgaagtcagggagggtggaagtcctgattacaacatataccacttatatgaacaacaaaaacgccgtcaatatgattgaatgggactgcgtcatcgcagatgagtgccacaagattaaggagcgcaagtcggggaccacacagtctatgaacgagatcaatgcgttatgtcggataggcctcaccggcacggctatccagaacaaatatgaagaattatggacccttctcaactggactaaccctggtgttctgggcccggtaagcacctggaaggcacaaatttcggagccactgaagatcggacaatcgcacgacgccactctgagcgagctcagccgagcacgaagaacagccaagaagctggttgagaatttacttccacaatttttcatcaggaggatgaagtccttgatcgcggatcagctgcccaaaaaggtcgatcgggttgtcttctgtcctctgactgagacacaagccgaggcctacgagaatttccttgacagtgacattgtcgattatatcaagacatctacagaaccatgcgattgtaggtcaggcaagaaggccggctggtgttgtcgccgctttatccccgatagggaccctccaacctggcaatcctatgtgttccctgctattaatgtgcttcaaaagctcagtaatcatctggcaattctaatcccacaaggagcagacccgaaggagaagcaggaaaaagatagagattatctggaacttgcgctgcctgaacaatgggaagacctttaccgctcgcgcgactcgatcgtcaattacgcgaaccctgagttttgcggcaagtggaaggttctacggaagttacttaagtggtggcattcgaatggggacaaagtcctcatcttctcgcatagcgtgcgtcttctcaagatgttgcaaatgttgtttcatcacactagctacaacgtcagctacctggatggatctatgagtttacctgaccgttcaaaggctgtagacgagttcaatgccgactcgcgacagtttgttttcctaatatcaaccaaggccggtggtgttgggttgaacatcacctcggcaaacaaggtggtagtcgttgatccaaactggaacccatcctacgacttgcaggcccaggatcgggcctaccgcataggacaacttcgcgatgtggaagtcttccggctcatatctgccggtacaattgaagaaatcgtctacgctcgacagatctacaagcagcaacaggcaaacattggatacaatgcaagctccgagcgtcggtacttcaaaggcgtccaagagaagaaagaccaaaagggtgaaatatttggactgaagaatttcttcggatatcagaacacaaacatcgttctgcgcgatatcgtcaacagaacaaatgtcgccgaaagccgtgcgggggtacaggtcgtggacatagacctcaaagctgaagaagaaggccacgactacaccgaccgaccaatgaaatccgaagacgaagcaatgagccaaatcgcggcgatgatctgcggcgaggacgaagaaaaagaccacaagcctcccgccggtcttccaatggcaacaccgcataagcacgaccccgttcaagcgattctggcaagcgcaggcgtggaatatacccatctcaataacgaagtgatcggttcctcgcgtgttgaggaagatctcagtcgtcgtgcggaacttgctccaaatgacacgacaggtgaccgtcaggtcttcatgtcctcgcagccttactctcagccaacggagcaacctgtgcgattcaagtatcatcctccgggggatgtcatacgtcgccagttttgtagtatggcgcggcggtttgggtacgctgacgctacggagtttgcgctcgttgttgagggcatgacccaggcgcagcggcgagcttgtctcgatcagtggtatcgagagagaagagagaaactactttctgcggatcaaaacactaaggaggagatcaaagacgaaaatgtttctaaggaggatatggatgaggatgaatggatcaaagatgacaagggtcccaaggaggatagtccgagtctttaagtggttttgctttcgttgttgttccttcttgcgcgatacccctttctggttgtataactagttgtataacatgcatgaaataatacgatactggaccacactcgctatatggaacctgtaaatcgttggtattaaaccattctcttagtatggctgtaggtaaatagatacccatgcaagatcacaacataggcggggaatcaaagccaagccaaagtccacaatgccggtaaattgggatatcgttcttgccaatccgccaatatctcagggaccttctcgtcaaagctctggcgggcagggccagtcccgtttgcccagccctcagagccatgaacaagatgctcagcaacagcagcctcattcagatgattggccagatcaagaatcgcctttccaccagtcaaggcctcctcgtggttatccttgatatcgacattgaagacatgaacggggtaattgagcgtgttgcccttattcatcaaatcgtcaacaacagcatcccaacagcgctcttcacaggtgatgatgacatcgacgactccaccctccgttccgatcgcacccttgtcgcccttggagaggttgtcgatgcgcgggacgccagggacccagtcctggaaccgctcgggcccccacttcagctggcggttgcggtcgagcatgttcaggatgccgttgccgcggtacagacgctcgtctttgctgcacaactcttcgtacatctggttgtaggaggtcgtgttgaagctgtacacgtttggttgggtgattgatgggccggggagacggacgagggagcctgtgccgaaggatatcacggggaaggctgttggggcaccggagagctggagatgggcttccattgagcggttgttgtttgaggcgcagactgtgcagaacttgagcttgtacgagtctgttgctgcgccagccgggttggctgtttctagggcttgggctgctgaggccatgtcggtttgtgtggatgtctctggtggtggagggggaggaggaggttggggagttgaagtccccgagtttgttcggcggggatcatatgccattttgatggaagactatggagatgataatagagagagagagactaaggggttgttgtttctagagggattttggaagtcgatgatcatgggggttttttgagattacaatattctgttgactatcagacgcgttagcagctgatttgagattgtttttttgtgacatgaaatgtgataacacaagttcagaaaaaaagcgtatatgaatttatccgcatagcaaaagctcagacagctccaataatatattcatcaggttgagggaaggagaaggtgacacagcacacataccttgtagttatcactcattatccagttcaaatgattatggggccgtagccctgggagaggagagaagagcaattttggtgaaggttgaaaagcttcgttttgttagtgccctggattagtcatgtagttaccgcctgttattccgcctggatagaagagctaacggggtaatattctgccggacaaatatcattgaggtatcttgaatctgttgtaaacatcgtccttttacagatatctctatcttataaggcctctgtcacacttttcacttttgtttactcttagggtatccatcaatatttaacttctcaaagcttttgaattcctctatattcctgtccataacctctatcaacagatctctaccccacatctatcaaaaaggagactcaaatggcagcaaatagtactatcaaaccagccctgattgtggtggacatgcaagaggatttctgccctccagtgagttggataagtacactactaggtcacacatactaatcaacagtagcatgggtcactcgccgtgacaggaggccgcagcattgcctcgataatcaacactctacttgcaaagccgggatttgtcgtgcgcatcatgaccaaagactaccatccaaaggaccatatctcatttgccagtaatcacccagggcctgacaatcagcccttttcttcattcgtcacaatgaagaatcccgctcgaggaaaggaatcagaaacaaaaccacagcaactctggccagttcactgcgtggctggtacccccggcgcagaaattatcccagagattgacacctctagcgaacatctagttgttcgcaaaggcatgcgcccggaagtcgagatgtactctgtgtttgctgatgctttcggaaactgtgaccatggaaccaacgcacattcggtcagtctagatgttaccgcggctctcagggctcaaggcgttacagatgtatttgttgtgggcttggctggggattattgtgtcaaggctacagctcttgatgctgcgaaggttggattcaaaagctgggttgtcgaggagggaacaagatgtgtcgtgcctcctgcttgggattctgttaaggaagaacttgagactgcgggggtgtctattatctctatggacgaccctatcatcaaggagctaggagggaagagttgatatgtcttatttctcatcttgcttttaccacgcagttttcccttccaagtgtttatttttccgtgtcttgtgtctaatatggattcaagttctatgctaccggccttagatatctattgtgtagatattatgaaggtgctatagatagatactgtattttcacgtgaatgtgttactttaccctgtgtggcggtattctcaattcttgatttccacagtctgtggttaaattgaagaccacaaaccaccgatatgtatacttgaaacaattccaatgtccgtaatcagtcagtacaataagatcgccggtgggtacatgatcgacaagcaactgccagaaacgtcttgacttcataccccctttccgcactactgcagagtgacgtcgtgtcaaggggggattcaccactcagcatacaacatagaatatcatatttcactacaggccgaactagatcagttcaaaactcaatctgcgcgcaatgctgcactccaggcggccatcaatgcccgccccaatcggtaccctcgacgagaaatcgaccgacaccgatgaggcagccctacacttccacgatcacagccaggcctctggaagtctcccatattggctcgtcaatttacctcggtcgcaatggactgccgagtgtcctagttttctacgtgaccaatctccgaagaatatcaaatgcctctcaatccctgattgccggtatacccgacaggactgggaggaagtgaaggagatcataggtacagctgctggttgggtgattagtgatatacttaactaactacaacttgcataggaaccaaccggatcgaccggttccagcgggtcccaagcgagctgcgcaagtatctggaatacatggcgcatatcaaagcggagtatacatccgtgatgagatttgtggtcaaggaaaggctgggctggggggataattgggaagagatcaagcctagaggtggccctttcgaatacgagggtatggcgcaggtcaccgggtctagaacgcgtgaaatactaattgtctgtatagaggatatccgaatcatatacaatgactggccatatggtgttgccaaggatatcatccacttggtagtgtggaccaagttcgagctggaagatgacccaaccacagatgacctaatggcaagcacacgagcggccatagagagctatgtgcaggacacattttgctctcgggtaccacccgaacaggtatgggggcttagtcggcatgaagatgatgaaaggctgacaacataggtggtctggttcaagaactggaagtcactcaagtcggtccccgggattgaacacttccacgtcatgctccatcgtcccgatatggcatttgtcagggagatcacccgcggagatgtacctctgattgaacggctatgatgtctgtgtctgtgggttagagaagagagagaagagagggaggatagagggaagagggagagaaaagaaagattctcctttccttgggtataacttaggtaccaagcataagatacatatgcagcccaaggaacgggtacatcctgtagtccccgccaagccagatgcccctcactgacgatcttggggaatgagatgtaaaggagtgtattcatcttgaaggagaggtcagagaaatacgtcactagccctgagcatttgcatgtgtaatttgcatttcgcatatctttttggatatcttgttgtgtaatttttagtgtcgttcttagtgtctttttcaattttttccctttgaactacgcaaatccgtttttttgccctttttccacttctccatagtaaaaaaagcccgttcccgaaatttccgccccaagtcagctgtcttgggtttcagacgttctctttttgtgttttggttttctggttcttctttatattttcataaatgtttgaaagcttaaagggcttttcgtataattcacttccgaacgcagccatgcctgtcccgcatctccgccgtacctcccaggccagtgagtttgacccttcttatccctttgtcatacatccaatacattcaaagcatttcaacatggcaatcaacatggcaactaacgccaatctaggcagatcatctatggaagattctccggcaagtggggaggatgaggtggttgagccagagcagggaaatggtgcgtccaaaccctcgataccccccagacacacaactgacttgatatgcctgggcagttctttcacatatcatttctcagctacggcctggcgccgacctgagtcgggtcgtcttgccgacattcatcctcgagcctcggtctatgctagagcggatcaccaagtgcgttcacacccctccaagcagggagcttggagctacctaatatttagatatatcgattaacacaacggtcttactagcttcatggcgcaccctgaaacgctcctcccgatgtcagagatcgaggacccggtcgagcgctttgtctccgtggtcaaattttacctgagtggatggcacatcaaaccacagtatgtcgcccgctagctgtctgtctaggaacacatactaatacccacatagaggagtgaagaagccgctcaatcccattcttggagagacttttacctgctactgggactatcccgacggaacccgcgcctactacatctccgaacagacctcccaccacccgccaaagtcgagctatttcttcgcagcgccggaccataagattcgcattgatggaacactcaagccccgcagcaagtttttgggcaactccgcggccagtattatggaaggtattgccattctgcgcctgatgagccacggggataaagaaaagggtgaacgatagtatgttgcgccgctttctacggactttcaggcactaaccaaaaccagtattctaacccaacccaatatgtatgcgcgcggcattctattcggaaaaatgaagtatgagcttggcgatcacagctacgtgcgttgtcccgagaaccacctcgtggccgatatcgagttcaagaccaagggatatttctccggcacttataacgcaattgggggaactatcaagaatgaaaagaccggggaggtgttatatgaactctccggattgtggaatggggagatgtatctgaaagatgtccatgtacgctccgccttccgaggtttcttcccgattcaacgctgacccagaacagacccacaaacaagacgttttgttcgacgcgaggcacgcgaagcattcgcctccgttggtccgccccatagaccagcaaggagaccgggaatcgcaacggctatggcacaatacggttgaagcgattgtggcccggaaccatatacttgcaacggacgaaaaaaccaagatcgaagaccgccaacgagacgagactgcgaagcgcgccgacgagggaatcgactggcaccctcgccttttccgtgccgtccaaggcggccctggcggcccggatgaaggcgaagaagacctcgactggataatcaatgctcaaatgtaagcacgaatgctccagcggttaacacaataactgacagtcccagcgacatgcaaaatccccaggtcgccaccgagcagatactatccatcgttcccatcgtccaaggtcagaaggagtcatcccaatttcaaataccgccgcatcatccccaccctatcgctcccgcgaactaggatatcaggcatatccctccacaaccagctaatgccgcacccgcagactccgagacgaaaacaactgtccaccagagcatcgtggaacggaaagatagtcaaacatcagaagaggagcagtttgtagacgcccaggaaacctcctaagtcaacccccaaagccccattgcgtccgactcccaacccccgggcccccaatccatgctatcaccgacccaatccaactcggtcggttgcgaaggtcgcctttttttctcactctcacatctgaatgatcccggagtattgtcacactccctctcttcctctcttcctatcttcctctcattctgccatgacgtagtcaacctgcgcagaaatccccagcacaaccacaactcgaggcgacggcacgacccattgtgatagccctctctgcccctctgatgtttcaacacagcgtttttctcggtcatcatgccgctcctattgctggatacccgatctgattttatttaaaaattcaaaaattttcaaaattatatctcaactgaacctgggcacatacatctctaagggatatggaagagatacgtagcaaggttttaatgcagcgttaaggagacataaaacaatagaacaaacaagagtcacgggaatctgaaaggattttatacacttaggacctggaatcttcaatctctgataaatctccccatttgctcaagtccgtagtattgactgatcgattaaatttgcgtcttctctgtccgttactatacaaagctctcctagaagagagggatatcacaatagatggcaaccacccatgccaatattaccatacaaagacaaccgaaactcccctccgttatccgaatacatacaaaacgccgcgtcaaaccattcttttgtcctaggaggacttgccgtcataaagccgcactgggaaagctcatgaatacagttcccccctggatccagctccacgctccagatcccgccgccgattaggccgcgggatagcaccagcagagccagtataagccaagccagaaccagccgccgccgccgatgcagcagacatcgacccaccgccctcatattcctccatctcctcctcaacccgaagcgtctcctcctcaatctccttctcggtatcctcacgcaaacccaatatgtccgggggtataaagctcatctggacactaggcgcgcccttgatatacctcagctgctcatggacggcctcaacaaggccctccaggtacgcgcgaggattcttattatcaagctttcgcatctccgacaggggcgggaagagtgagaaatcagggccgaagtggttacggaaggcgacagattccgggatcacggggtcgatcatgttttctgcctcgagcaaaatcgaggtctcgtgcgcccacgcacgcgagacgttgcgcggggtgtagccaccgccgccaacgaccatcatgggcagcttgaaggtcttggcgtatgcgacacaggcgccgtgcgcgcgcacgttcaggttgaagcagcctagtcggtcgcagcccagactgtcggcgccgcattgtaggacgattgcgcctggttggtaggttttcatacatgcaccgattacctctttgaatagtgctatgtaggactcgtcatcgatgccgtcgttgagcgggacgttgatggcgtggtgggcgcctgggttgagtgggtgtgcggggcctgtgtcttcgcgtgcaccggtgcccgggaagaagttgtctttgtcgtatttgtgaaaggagactgtgagcacgcggtcggttgaccagaaggcctgctcaacgccgtcaccatggtgtacgtcgatgtcgatgtacatgacgcgcgggtggtggcggaggagctggagtgtgccgaggacaatatcgttgacgtagcagaagccgctggcttcggcctttttggcgtggtggaggccaccggaccagttgattgcaatgtcggattgattgttgcagagcttgcgcgcggcgtcgacagtgccgccggcgtatagcgagctgtagctgtacagtccgtcgaagatggggcagtcgtcgccgaaattgaagcgcaccacgttatctgcctgatcggggttgtccatgtcgccgggaatgatctgttggaggaagtcgaggtagtctctctcgtggaagtcggccatttcctcgtaggtcgctgcgcgcgcaagatacagatccatggcgtggtgcatgccgtatgccatgacgagctgtttagtaagtgtgaggcgccatggcttcattggatgtgactggccgaagtggtaaggctcgacggctggattggcatgccatgatacccggtaaccttgtggacgagctatttgtaggttttgaagctcggcgagggacttgtagtcgacggtgagggtcggggcgggcggtgcatattcttgaacgacggaggagcgagccatcgagggagtatttgggaaacgacagaggatcaaaggattggcgctaagttcattttagatgggccaaatggaattcgagatgaaaccgcaggaagttcatgactaagcgaatctgcggggtggccaaagatcgccatgtttagtctatgaaaggaaggaacagacaaacaggaaggagcaaagcacctaggcagttttcaattgaaacggaagatagaagagcttctcaattgacatcaattgcctacatcacaactataaattatactttgcctatagtgaaaactattctgtactgtcccggtagtgccccgcttgaattgctggagctcattgtagccctaggtctgcgtattcaacgttgctccgtttgagttcctcctgtgatgattgtggcattaggagatatcaggcgatccttggtatattccaaggttaattcacaataccgcaacaatcgatatctggtaatcacaactacaccgacgatcttcgctgaatcaataagtctacataggtatctaagctacccttgtgtttaggatgttgatgtaaaggatatggcacttcggggcgatatcggccgcgtggctctagataagtggagagtgcacatcatccagggattgtaattgcccgaaagaactcactggtggagaagtgatggtccaaggctggtatcacatgtcctaccgccggagagaaagctatttgcacggctcgttcctgaggtgaacatatatcagccccgagtcttcacttagacaataactatacggatatcggattagccggcaagccactacatcactactggttctgtttcttagtatacgacaacaatcatggctcttccatcggcagcaaccagcctgcggcgatcactgcaagatccccaagtattcatcacagccccaggagtatatgacggaatgtccgcacgactagcactggcagcaggcttcgacgcactatacatggtatgcaatgcaagatgaccaaggcatcctcatccaagccccgagctgacaccaaccagacaggtgccggaacagcagcctcagtacatggccaagcagacctcggaatctgcacgctgaacgacatgcgggcgaacgcggagatgctcgccaatctctcaccgcgaacaccgctgatcgccgacgccgacaccggctacggcgggccgatcatggtagcccgcacgacagaacaatacgcacggtccggcgtggcggccttccatatcgaagaccaggtacagacgaagcggtgcgggcacctctccggcaagcagatcgtcgacacgaagacctatatcagtcgcatccgggcggctgtgcaagcgcgcgagcgcataggtagcgatatcgtgatcattgcgcggacggactcgctgcagcagcacggctatgaagagagcttggcgcggctgcgggcggcgagggatgcgggcgcggacgtcgggttcttagagggcatctcttcgcgggaaatggctcgtcaggttgtagctgacctggcgccgtggcctttgctgttgaatatggtggaacatgggtccacgccttcgatttctgccaaggaggccaaggagattggtttccgtattatcatcttcccgcttgcgactttgggcccggctcttgtggctatgcgggaggcactggagaaattgaagagtgatggcttgcctggtctcgacaaggagttgactcctcagatgttattcagggtatgcgggctggatgatagcctcgagttggatgcggccgctggtggtgtggcgtttgagggtggcgtggatatcggagatgaatgaacggaagaccaccgcctaccagacccggtaccggagtgagatattgtgcacattgaacattggcaacttccccttaagagtatcggcctggacttatgtagtaccgtctccaccagtcgtatgactctattttcgcattcagccacattcattagtaggaagtagctgattctttgaagcgtttctcgaattatcatctaattaaatctactaaattttatatgtggctttcttttgtggttagggtaatttgacaggtagatttaatttcctataaccaataggacaaattgcagatcgaccgaaccgaggatcctcccgggtcgaccttggttttgtttatttaccccgagatttctacttcgtacggtttcctacaacaaggattttaagagtgaggaaatttagagtccaagtgtgtacatatgtattcaagggtcgtgggtacctgcattaagtgaggagtctgccagggactggctcctgcacgaattagccctaatgtttcaggaaacgcctgtggcaacaaaatgcccttggtgtaccgtaaatacggactcaaaaatacacgatataggtacgatgcactacttcctccgtacacctatggagccgtggcaagccaagcgcgcttaaagtttcaatgagtctaaacagatgaaaccgcttcacggccagccccagtttgccgagttggaaggtctggatccccgaggggccagtttctgcgtgccattatggagacaatcaggagactcgtcatgtgggtggggaagggctaagacgctaccggtgaatatatgaaatatgttgtaagtgtgtgccttacagaaaatatccatcggccgtgtagggggtctggccgcagatcaacggcagagattgacttttttatgcgcatatcattgggtccgatgggcagggcgaggacaatcctcattaattgcaacaagaattgtaatggaagaactaaggagtagataggcatgggttgggtagggacatagatgttagttgcccattgtccacgtatttgtacacgatgcggtgatgagttgtctccattaagattgccttgagattcgtaacacagtttagatccttgctgtgcccttcgccgattggtttatgtggagatttccggacgacggggatattaaagtacatgcgtaagtttttatgtacacgtatgttatacagaaaccttggtcatattgcttatagaagtatcaatgttgggctctggtgcagtgtatcgagatgactatccagcattccgatcacgcacgtgtttggcattaggcaactatacaacatagaacactatcaatcccaataataggacgcataataatagaacatacggggtacggagtactccgtatgcgaattatatagaaataataatacaacatactgaataggagaaatccccctatcccaagtcacgaatacctgcacagccgcgatgagaggcatagtatagagaagtacccagtaccaaggaaacagagtctgggccctgggcagcccaccaatcaaatcacccaaaacaacgcacggccaggaaccgccaggaaccagccaataataaatggcgtacccctgatattctggagccttttcgggtttgggttcaggtcccagcctgacccgttattgtgtaacttggtattgtactaatagtctctagtccccctagtccactttgttctcttcttctctcttcactctcacacacattcatttgaattgaattttcttctcgtcgagcgtccttttcgctcaagtcactcattttcaagttattcaattcccaagatgcatttctccaactccatgctgttgatgacggcgctgaccgctgggtcggctgtcgctcgtcttcatggccacgaccgccgtcacgcccaccccagagatgtcaacgtcgcagtccagcccgctgtcactgctgctgccgaggttgccaatgttgataagcgtggcgaggaggtcttcgctaccattgacggcaaactcgtctcctggatcaacaactggttcggcgacgagacctcgactgcctcctcggaggctgctgaggccaccgagtctgtcgctgctgccacttccactgctatttcctccgccgaggccacctcgaccgccagcgccaccgccgttgcctccagctcctccagctccagctcctccagctcttcctccagctcctccagcacctccagctcttctagctctagcaactgggccagctacccctccgatggcgtttactccaccaccggattcggtgcctccactgccagcaagcgcgttggcaccctcgactgggactacatcggcaacgtcggcagcccttggggtagcaacatcatccgtgtcgaggaggacactgccagcgagtacaagcacgttatccgattcgagaacgacaacgacaatgcctggaccgtcaccatgtggaactcgtacggccccaccggcggtctgaacggtttctggagccccaactccgctctgaccttcaccgttgagcccggccacagcaccttcgtcgccatcgatgacaactcccagggtggttggggtgccgccgagggcgaaggtctccctaccaacaccgtcggcgagtacgcctccacctggggtgaattcgacatgagcaacacccagaacgacggttactccggctgggatgtctcctgcatcatcgctgagcttgctgatctcgatattgctggtatgcagatttgcaaccacgagggtgcgaagtgctcctccatctccagcggtgcctccagcgttgtcagtgcctacacagccgccgaccagggcaagaccgacaaggccattgcccagtccgctggccccgtccgtcttgttgtcaacctgggctggtcgtcttaaatcgtccatgctctttttattttttatttttttttcagcacctcccatttctaacaatcttatcttctctaccgagatttcgtctttcttgcgcaaatggttcaacgccgaaggtgtctttgtatctttcccctgattcggtgtgtgcgtgcgcaggtcgcttgccccagcaaccatcctggccacacatccttccaccttcgagcggctcttcgacggctaccttttttttgccgttgacgttctcatacatatctttgtggtcatgattgcctccatcgtctttttctctgtacatataccatctgaagcatctgatttgagagttgatatcatttcctttatcatttcatctagaactggttactatatatactttatttacttaacggccattgggccccgatacctatggatatctaaatataccatccattcactattctgtctgttcatctcgccggatcattagtgtcgaggcctattcgtcagtcataaacctgaaacaaaccttatctatttcaagtctcacctaccttaaagctgatgtgcatgatccttcggcactatctgtatgtcttgcatgaaagctaccccttgttttgcatatcgaccgatgaaacctaaatgccaggcccttccagcttcaatacaacaagttgaatacaagtcaaaatactacgaggacactatttagggctcccatggttgaatgtacgagagatgtgaagtgccgagttagggcttgcgaggaatgccaggataccacattgatatttgacaagaatggatgtttccgaggttttttcgaggcctcgatgattttttccatcgccaaaggaatattgcgttctttggaataaattgagttcgatataaattccagaacaaaggagacgtttcaagtagaggaccaaaacaaagacctgcagttctgatgtgacgaggaaccgtacgaaggccaacacaatacaaaggatagaacgcaatgctatcgtacagtcttagctttcacccaaatgataaaacaaaataccgaccccgtaacatccacagaacaagcgtaaagacttcagcgcttagaacgcgcccaggaagtcagccgccgacccaggatcaagctgtagcacaccggcatcttcatcaagatcctcctcttcctggacacccccagtcgagaaagaaagcaagcccacatgaaccatatacccaacgagagcagccgtccccgcaacagcagtcgcaacagacagcaacatatccttgttactcgaatcggcatacgaagacaggacctgtttctccaccgcgctaaaccccgaatcagcctcaacgacctgcttcaaccgcctgttctggcgcacctcgcgcaagaacggcgtgttatcagccagcgtgttgaggagtgtagacccgacagcggcgacggagatgcgctccggtgcgcgccacggcagggcagctgtccccgtgggctggagagcatatttagcatcgacaggcgcgtcgccgaaacagcgactgcacatgcgctccgtgtacgccgccagcagcggggccttgatgcgcattgcgtcgcgcagccaggggaagactagcttcgggacgagcgccagcgacaggtagcccagcgcgagacagtccagcgaggaggggttgttgttgtcgtcggcggggagcaggcaggtcttggtgcgggcgagcatggcttcgagcggctcgaagaagtcggctgttagggcttccaggcggaactggtttgtttgcgcggtgcggccgaggagcttggagactgtgtcgcggggctgctggatcaggttgctggggatttggccggatgctacggcggcggagtgctcgcgtttgcgctggtcttctagtgcttgcaggtctagtgaggagaggccgaggtgttccgtgcgggttttggcggcgccgtgcagcttaggtgggaggatccattggtttggccattggaggagagagccgtacgctggggatgtgttggcgtagtagttctggctggttacgtagaggtacaggtcgatgagggattggccgcgagattcgatgaaggaggagaagctgaggggaggggttattgttagtattttgtgcttctcacgccgttgtagaggtgggagttgcgtacgcaacgctatcggccctttgcactttgtctaggttttgatccaggttccatgctccctccgagtattggcggagatagtcgacgatgttctggaaccggctcacccagacggagccattctggagagcggggagctcgcctattggtaaatcatttgttagctgtctgattccggtgatgctttttttttttgttccggtcacgtcactgacctgttggggacacggatggatcgctgctcgcgatcagctcccacgagtctttagggaggacctcggcacagtatgcaattgcagcaaggcatggtgcgtcaattgagggcagcgaaaaggccgggccccatacatgcaattgtagtaccatggtggctttgcgcttggagaagaatggacatccgcgattgatttgggccggcgaatcacgtgtgtttgtcctcggcttgatacatggcttctataactacatgtcgagatacaatgtttattcacatcaatcgagcttggattgtttgtagatgtgatcttcatgaaatcagataaaaatccctcactcttctccaaaatggtccgttctcgtttaaccatagtacgatgtatatatagcacgtaccagggccatgccatcttcaacatccaagtcaaaatagaaataaataaaaacaataaagtgtcacgctaacccccaagcttcttggaagtcattattaaataaaataaaaaacaagatgtggcttgaattacgaactaggcaacgccgttccattctggcataatcattgataattagctcagtatctcgttttggatagattgccaaccttcccggattggaatgccagggattctcggccagggattctcgagacggcaaatcggacatgtatatctttcactgccccaaagcatactccctactcgacccgctactcccgaaggtccgggcatcaatctcactcagccgggtaaaaagtattgacgtcaaactcaacgggcctcagtcgtacgacgcagggcatctagaacattaagagcctcaatattcatattcaccgcctcgtggcacagctgagcaccggcaatagcgcccaacgcatccgtggtgtacttatttcccgcaaggttcctcctgcccaagacaggatccttggccgccgtatacatcacgagattcccattacaagactccatatctccggttatccgactatagtgatatggatacccaggggatgacctcattcggcgcacgtggctatacaagcccaggtgggccacggacttgtcaaccggtgccttggaagggtttcagggttaatttcagaagcacagacgtccccaagggcctgagacacgttgagtcaaaactttaggaatcgttagtttgattaaatatggagattgtcagggcgagcgttacggccggaagcttactttctcctaggtacttcctagattgtaacgcctgaagtgaaacaggaagggaaaaaagtcaatttgatacaaatccatggaaggcgtcgcggataacaacggatataccacaaaagtgtatcgggttgaggggtagaggcgggggcagacacttgggaacactatctgcgagatccattggacacagattgccgggatttcttcaatgacgacgacatgcaactttatcggtcgagtgatgggccaacggtgaaccaggataccagcacgcccacctgtggggatggtctaatgacaatcactgctcgactatggatgattggttgtaattggttagaagaagcagtctgagcatggagcatttgttggtccagctagtactgtactggaactagtaacaatagtgaggccaacctccactttgctatacaactcgtaacaggaaaatgcagggcacgtaccaaacctggaagcgctcggacggggccaagctcgtatcttccttccttctccgctcggccgtttagcgtttaatgatagtattacgagctaaatatacacacgctagggaaggtgtcgatatgtcctagtctggcgaatattggattccgtgtcgagttgaatagtatggtgtgatttgagactagggttgagtcgggtgcaatatggcatatgatacccgatatatatacggattgcacaatatatatgtaaggccatgtggccatgcatcgtactcgatgcggcacatgcgctgtaaaccataatgggaggctcgataaggatcgcgtcagatcaaggctacttcagatcttatgatggaagaagtgcatgggcaatctgcagatctctagattggtctatcgaccagtgagtcatagttgacgtgtatattcgacctcctcgtatctggggtgttgattaatgggtgaagtatgcgtcgattcgactaccgcgacacccgccttcgtgagatccctgctagcttcatgactagtgattgctgcgggatgctgcctgattagtgaaacgggtcaggtgggtgtcacccgcagtttcccatctcgtttatgcacgacatacgtgtggaccatacgcaattaagtaaatgcaacgttctagataaaagacaaattgctctgttgggtatactaagtctatgatacatgtcgattcggattggccagatgcaggaaagaaaggaaagtcagaaaacagaaagggaacaaaaacaggattaaaaaagaattccaggcagtcaagatgaacaggtcacaacggcaggaaaaagaaaagaaaaaaaaagacactgtgaccagcaaccagtgagcgaccgagttgatccgaggtaccaagacaggaggggttggccaattaatgcgcggcggctgaggagctgcaccttctccgcatctgcacgtcacagatggtcaaagatcgaacagctgaaacaaaagccccgcagacgaccggtgatcaacagtgtcgagagttgaagtgggacaaagagcaagaaatagaaaggctattaatgcacgaggggtagcgccggcgctaggtcccatagcgaacgagttaaggttgctgaagagcgagagaaccaagcaaaagagaattaaaaagtgtgtccgaggcccattcgaaacaagtttttcagcgcgcgtagagctgcgatggctcgcgaggcgtcgaagtaaaatgtcaagagatgtgaatggacggtggaagagcgagcgctctctttgtgttgtccgtctcaaaccccaactttaagcaagggcgtcctttgtttgggcggaacgtagtggaaattaggtgttgaaagtccgaatcgaaacaaaggatcgcaggtaagagccgaaactaggtcgaagtcgaggtcgtgagatccatgctgagggtccaggtcgtgggcggatctgggaggaccagaatgcgccagagtcatcatgttcgttgagaaaaggggactgtggactgtttatttcggcagcggaggcaaagggcccttaggaggaggaccggggcatggagggaactgagaggatccgatggaaggcattgtggttggaaggttggaggttggaggttggaggttgaaggttgaaggttgaaggttggaagttgggagttgaagttaggaggttgagagtcgatcgtagttctgacaacagactggaagactgatgggctagtatatgtagcaagatacgatgtgagtagagtagatttggatggagagaagaaggggaagaaaaaaagttaaccggagcaggactcttatagaaatcgtctgcctttcccccaacctttccggccaaccactaattacagactaaattagttcctaaaatccccatcggacatccctgccatgaacaggaggctgagtatccacctgatctgacgtagggaattttattgcgatttacttgctcgaattagcccgggtaacggatgaataatgcaccccaagtggaaatccaatggaaaattcccatttttttctagaagctctccactacttctgtggcttgtgtttcctgtgaaccactagtggaggagagcggaggaaaatgagacacagtaattagacatctatgccgtgctacctgagcaatatccatagtaccaatgcagtccagcatatatgggctcacttatgcagctcccaaatttatattcaggtttcacaacccccctctgcgtatatactcaatcatgaaaccacgcgagatgacaactagtaaagggcaatctcccgtgggcccaccgaggctccatagagacggtttcttgatgcggtgagaacgactttttttctatttttcttttttgaatatgtcatcttattagttgtgcaactgtacagagtactgccgtaattggaatatgataaacggcaaaggtccatgcacattcatcctgtatgactcaataggagagaacagcaagacgttagggcacaacacgtgcatgtttgcagatcccgagagcgaaggagcgttagcgggagagaaaaaaagcaaaggggaaaaaaggaaaatagaaaaagcaaaagaaaaaagaaaaagaaaaagaaaaagagaattttcattctttttagggtcaaacgggatggccgattcgtattgattacactaaaagggtgtgacagccgagttcccaagatgctgggattgtagaataaggataagcctgctcatccggcatcccaaacaacctgatatgacatatcagacacgcgctatttctgccagtttagcctgatacttatacgccatccagatagcaacaaacagggtggtacggtctcaggggccgacgagaaaagacggaaaaaaaaggataaataattccaaaataaataattcccaaaaataaaaataaaataaaataaaaaagcaagaggcaaaagcaaagcaggcttgaaatctcgaatcgaggacccatcctcaaccgtggtttctacccgtgctaccaaacaaataaagccgtgattgagacatgcaagaatagaaaagaactctttggggtaatgcatgtcagtcccttaacccacgggtttcgcatttacttctccgtaagcacttcggctattattacatttcattatatgcttcgtaccccgtacataattccttatcgtttgctcctcccgcttaggccctccggggctctaataacaatatgtaatacagataaaagccgttttgggtcgtttagcgtgtaccatcatctccgacggattacagagccgatcagcctccgcctatagtaggtgtggctgatagtccctaggtatgatcgtcttactgcagaggactgtgcattgcacatcatcatttggaaagcatgcagaatagcgtcgtacatctggagaaggatggatccttgtactccgtatgcaatatatgaccccagtccttatgtttattggctattggtgagcattgcatcgagaggggtttgtccaacttttccttcatcttcttagtggttacattgtgcacatcactgggcctggtgtttcacggtggaagatctacttcacccctggtgtggcgttcatggcgtgattattatgggtagcggttacttacttcgttgaatgtgtgtagtgtggtatgcactgaaggtcgaagtgtatataagtatatagtgtactccggacggactatgcagtactacttacctagaaattccctagcttcggggtgcttacaatcttccccggaaattacctggccctaacatatgtactgcaatggtcacccgttacattccgccatcattccctgtttttggcccttttgaaatcacggcaaatccaggcagagggattatattactgattgtactccgtactccgtacttctggaaatccacgcagatgcactccgccctatatagtaagcccgtgctaatctagaattctcacatgccctatgttgcaaatgcaggtataaaacatataacggtacccgggatttgcaaatgaaacccccgcatatactcaaaggggtaggtaaaaggaattacaaatgctatgataacaattggactccgtacggagtactcggtacgttactccgtagcaacagcataatttgactaggcctaccgcgtccgatgaaatgtacggagtccaaagtggggcaaagtggcaaagatacatctgtaccttggaaagctgtatgcgaccacacgggtgtacctgagctaagggtcggcgaaccaagaaaggggaaagaaaaaagtgggaaaagtggcaaaaaaaaagggcaaaacgcacatgggagaaaactctacccatgaactagcggaccgcagacttcaataaacgagcccaattaggcaaagtcagctccacttggatttccatctcaccgttccgcaccgttggaaataaaagctgtggagttgcgatttgaagtcggagatttatgacgagttcagcttgctactagtaaagagatcggaagttacccctgatcgtgctacgatcggtttgagatatctgatatggcctgtctattggctgttgatttagagccaagggattttaaagaagagatctgaggttgagtacacatacactataaaatatagttcaaccaaaaaaccctttttagccatgtgatttgtattaaattttcggtactgaggcttatgcccccgaacccagcacatcgggaccagaatacatacttccccattaagaaggtgttggttggggtcacgggacaagacggagacgggctgtttcaggtcaaggctgaagctccacttgagaatcttctagcttgccttctggaagttgcggcccgaggttgagagcccatagttaccacatagggttttcatatgtggaatcagaatgtctccgaagtaattggaatatttccatgcccttgtccgtgttctctgccgtgtcacgaatgcgaccgagacatgcaaaacgagaatcattacggagtacagagtaaaaaagtcaatatcacattatgtcttattgcatgcagatcatcgagatgtcactatttgcatgcacccctgtctcgtggttgtcatttccatctcagcggctctgtctgccggcaccgtgcctgaagaagtcatccggggagtctgacagcctgccacttgcgtgacctgtctgatcttcggaaacccacctgcccatcataaaataacattacacagtgcaattcatttcgcggtagtggcaaggtttaggctctcatcagggacacctagtctcgtagatcaaggagttgacagaccgcacgacatgggtccctgaacctatgattcaacaagatgaaacaaaatatctctcccgtttgcaacagggaccgatgaagcacaattttgtgacgtttgcagggagtttgaacatcacatcactcataatcgtattctgtgcttgacagtgcgggcagtgcgggcagtgtcacagggtcatgtgccactgatcatcccaccacggctgcccacagtacgaggttgggaaagcttgacagtaagcaaggtccctgtcagccacactgataattgccaggcccacaaacgctagctatctagcttgatcaatcgtcgtcaaccgacgcctgggcttgggttgaaatccattcttccatcagaggccgattcgactcagatgccgcagcacttggtctggctttgtcgcccttgcgggtgatcaatagacatagcacccatccatggataatgaagctctcataatgcgtgctaaaacggagcttcttttcgtcactgccagtcgtgtcttcaggtggcacctggccttccctggttgtcctccttctcttgctcgaccgacgtccattccctagggcaacttcatccgcagattcgggaatattatgcaattccagatcaggttcactgtcactctcgatcatgatttcgccatctgagttaaccttggcagctgtatcgcccgagacatggtctggtgccacctccatttgtacgtcttgatcttcattatccttcccctggaatgtcttgctgcgcgtgaggagcgaatggcgggtacgggattggcgaaggaagatggccacttcgaagtcatctaggtagtgtaagatacttgattcgttatacagagatagagaggtctataccttctataatgacatccttgactggcttgcccttcttgcgcaagaacaaccgctcattctcttcacgcagcttcggaaggaccgacggtcgaacggcagcgatgacgcgcgggaggacaggatcgcgagagtccaagagccatcgtgaatcgggtgggtattcgagataaatgcgacattccagtactgagtatttgctgatgcggaggtatcgtcgaataggtgccatgttcgaatgtgctgcgcaagggcgcggtcgagttccctatgacctcaagaccattgccaagcgctgttgccgccgacctctgattggcgatcgagacgcgtgcaaggggctgaaaggactcttgcctcaaggggctgtcaaccacgttccttcaaaaccttcgaatcattccagtcttcctatcctattccatacagaatgaaaagatggaacaacgaccacggaacacaggaaagacctcatttcctatacacgtgacttgatcaccgcgaccgcaatcggatactgacccccaaggtcctcaacacgctagtgttaggtaccgggtactttcggatgcaaccaaaattgtgtgggcgctcaagtacctggtaccggtccgatggagtagaaaaatcaatccttgacgtcttcgcactcccaaggtccccatggatcccctccagtgctacttcgtgattaatgtaatcaaaaacccgcaaattctgattcggttttgattctgtctttcctttaaaggaactcgttgatttattatctatacggttaggttccctcagaaaagcaagcctctatttccttctcgatatcttccgttcaatcagtatcaaagtcaggatctcctggtaattgcatgcatggttagtggatcaacgactcatctcgcctaccatcgaggaccttggggattgcagtcaagcctcgcacattctcccctcaactagatcacaaatccttctctcctccattggacaacttgcacaagtcgtgtgtattctgttcacttccattggctcctaaacacatccttctcgtcccacctctacacttccccatacttctcgtatcaccaataaaccgagatggaatctttttccactctcctcaagcgtgaggacgcttgtgattccgggaatgagttcgacggccggatgggcctgcggatctcttccgtctttgtgatcatggcgggctccatgtttggtgccttgttcccggtcttcgcccgtcgctttagcaagaatggtggatttcccaaatgggcctttttcgtcgccaagtacttcggatctggtgtgatcattgccactgctttcattcatctcttgggtccggcggaggaagccctgaaaaatgagtgcttgaccggtccaattactgagtacagctgggtggagggcatcatcctcatgaccattgttgtcctattctttgtggagctgatggttatgcgtttctcgcactttggccaaggtcatgtgcacgacgaggaaggcaatacccacacccaactcgatgatcactctattatcaacgaaaccaacgagccgaagactcacatgccaggcgaggatcaccttggtcatacccttgagcatcacgataacaacagcgactccgagaacgacatccaagcggttgaggattatgccgctcagcttacttcgatcttcatcctggagttcggcatcatcttccactctgttttcatcggtctcactcttgcagtgtcaggcgccgagttcattaccctttacattgtgcttgtcttccatcagacctttgaaggacttggtcttggtgctcgtctcgctacagttccctggcccaagtcgaagcgcaacactccctacttcctaggccttggcttcggaatctcgactccgattgccattgccattggcttgggtgttcgaaacagctacccgcctactggacgaaccacactcatcgtcaacggtatctttgactctatctccgctggcattctcatctacactgccctcgttgagcttatggcacacgagttcatgttcagcccctccatgcgccaggctcccctccgcgacgtgctgattgccttcttccttctttgtgccggagctgccctcatggcgttgcttggaaaatgggcttagaggggtctttgcttccatgatgatgagaaaagttatggggacactcttctctcctaataatgtgtcatgtctttgctttttctttgccagttttttttattatggtcagatattgtctgcatctgtgctatccacgggatccggagcagttttagccattcgtctatccggcgttattttagcgaatgtatcgccttcttaagttcatgaataataattccatcagaactattcaggaacagtcaaatagtagacacgtgcttatccgaggtataccaagccctaccccgaggtgaaccgtggataagcaattaggttaaattctataccaatcagaacaatcaaaagacgcctcaaaatacccctagcatccgcttaaccatttcctccatagggctgcttcctgactgggattccccgctccaactcgtacagcaggtggaaaatgggataaagaggagagaattacgaggggtgcgtgacaccctttgtttgttccctctttccttctgaaagggccacagttccaaccttttccaactcccatctctcaaggctgtcgaaatggcttcggcaagcgacttgaccgcgctccctaaggctgcgactcaagataatatcgaccaagttgactctgctccttcatcgggtatgtcgttgaagcaacaaagtctgtcagacctcttcactattgtgagtacttcatcctagcctattcataccagatttcttcttgctttccccgcactcgcggctcaagttagcgaatgacagactgaccaaagtggatactattcaatagtttgcaagcggcttcgctctgatcagcgatggataccagaacaatttgatgtgggtcgagcgattgtccccatgcacgactgtatctaaccacggaacatctcataggactatgaccaatgtccttctcaaaaaggaatatcctaaggagtacactaccacggtcagcacgcgcgtttcgaatgctctacttgttggcgaagtcattgggcaggttgttattgggtacgcacgaaacaatgctgattaaggctatggacgagttctgatgactgatattctatactagactgacatgcgactatctcggccgtaagaccgccatcgtctttacaacccttatgatcgtcgtcggaggtatcctggccacggcctcgcatggcgttaccatcgatggtatgttctggatgatgacggtggcccgtggcgttgtcggattcggtaagtgaccctcgatatatttgccttgcttgtatatctcaaaactatcattccgagttgtgtactctactaatcatcctcaggcgccggtggcgagtatccagcctcttcaacttccgcctcggaagcagcaaacgatctaaccccgaagcaccgtggcccagcgttcatcatggtaaccaactttcccctgtcatttgggggcccattcgcggtgtcaatcttcttaatcgtactctcagtttgccagcagtcccactacagcaccgtgtggcgggtgtgctttggcataggatgcatctggccgctgtcggtgttttacttccggatccgcatgctgaactcggtgctgtaccgacgtggagcgatcaagaaacacgtaccctacatgctcgtgctgcggtattactggaaagcattgattgggacttgcggtgcttggtttctttacggtaagagacccccccagtacttacagacgtgtagttactaacatatatagactttgtcactttccccaacggtgtcttctccggtacaatcatctcttcggtcgtgcacaacggcacaatcctgcaaacaggcgaatggcagctcctcctcggcgcgatcgcgctgccgggcgtcttcctcggggccattctctgcgaccgccttggccgcaaacccatcatgatgattggattcagcggatacctgatctttggcctgattatcggctgcgcctatgaacgcgttactaagatcgtgcctcttttcgtcgtcttctatggactgatgcagagctcgggcaatttcggtccgggaaatatgctcggtttgatttcgtctgagtcgtatgctaccggtgtgcgagggacttgttatgggctctctgcggctattgggaaggcaggtgctgctatcggtacacaagcgtttcagcctataaagactcatctggggaacaagtggacttttattattgctgctatttgtggcgtggttgggatcttagtgacttacttctttgtgcctgatttgacgggcgaagatttgagggtgcgtgatgagaagttccgtgcttatctcgttgccaatggctgggatggtgatatgggcgaggacgatttgcaggcggctgctgatcaggtcatggacccgggttttcgtgatgttaaattcgtgaatcagacggtgacggcttagaattgcggtgcactgcaatcgtcaggcatggccgaaggtcgagaatggggatatcataatatccccatatggcttccaaacccagtttccatatctcaattgtttaggtagaaccactgtgggatattcgcatatttgtagtccacgataacacaatatcttcaaatcccgaagtctatagttacagccacctacgtatctccagtctgcttcctttggcgtcgtaatgtataccaattagtgccttgtgagtcccctctctcgtctagtccaaagagcaatgataaaacctagacaataagcaataaatcccttgtagaaatcaccaattgacaatcatggactgcaaccgcaaccatacatgtaagcttaaagcacagaccaacgctaaacctcggtccaatctccgcccatctgtccacatctctccaattcccctctccccaaaccaccccataaacacaaaatgcgtctcacctccatcatcgtcgcagccctcggctcactcgcagctgccgccgacctcggcatcgaagtaacccacgctgtcgaatgcacccgcaagaccgtcaacggcgacggagttgccatgcactaccgcggcacacttcagtccgacggatctgagttcgattccagctacaaccgcaaatcgcctttgaccttcaagctgggtaccggtcgtgttatcaaggggtaagttaaaagctgcccggggctgtttgtggatgtcaatctgcaattgctgcttattatccgttgttcgcgtggaagctaattcgtgtgttcgttgtatacagatgggaccagggcttgttggatatgtgcattggcgagaagcgcacgctgactatcccacccgagttcggatacggcgaccgcggtgtcgggccgattcccggcggtgcgacgttggtatttgagaccgagttggtcggtattgatggtgtgaaggatgagctttgagtgtgcggtgcttgatacctacgtatgtgactatctgggatggattttgatgacaaggccgtcatattcggctaagaacaaatatacctttttgcatgcgatttattctatgatatagcagaagggtatctcatttatgtggggtaagatgtacactgtatacaaaccggctgaacaagtacagcgaagtaaaacaacaataataaagtggaccatgtatcagtccatcgcgtccagagcattctcggtttggatatcatgctcggaaaccagaattcctaccagacactcgccaaggatcccctcccagttgacccacgggtggatctcctggaacaactgtgcagagtccttccccgcgcctcgaaggagttcacccttcccacctggatggtaaggggcgtagggcgagatattgtacacctttccatggtacgaggtccaggcatcacgacccttacgtccgtgctgctccttcagcattgacggtgtgacccgcaaaaggcctgggggaaggccttcgccgcggagcttgttcttcgggttcgctgctagcgctgcccagtcaaggggcgagaatcccggctccagaaccactttgcgcgatgacgactttttcaaggatacttgtgtcggggctagggtgctgctgctaagacgactgccgctcctcggtgcgcctaggccgcgctgggaggcggctgctgatggtggtggaccgagggagttgccgctgagccgtgggggttgaagtgtgcttgtgggggcgaggcggttcgcctgagttgctggtcggggccgtggtactgggggaggaggcattagggaagaagtgccggttgttgttgctctcgggggtatagatggttgtggttttggagggggtgcgagggatggctgcggtggcggtttgaactttggtgcctcatggtttgtcgaaggtcgttcctctgctgttccattcacggtttgtggaatggacggcatcgcggcagcttgcgatgtctcgcttccgccgctgtctaggctgaatgtggggaccgcaaggacggggagtggtacgctcgaggccgaagccttgggtgtgctctgggaatcctcctcctctgtctctattgatggcgtcgaggcccgtgggccatgcttccgctgcacaggctcgcttgcggtggcagcaaccggcgcgtcgggtttaggttccggagaggcaaaagaacgaggttcgacccagctgcgaggagggtaacggtagagaaagtagcccgttgttgcgataagcacacccacagctacccaacccataccgactaaatcagaaaggcagtgaaagtgagaaaagtagtccagaatgttgtccctgattagaatcacaatcttgcagattcgccgagaaaattggtccgtgcgctataaatatgcaacattcgagatatgcttaatagaaggttaaatactatttggtcaagtgatattcaataattttgttaattaattagactaattaaattgagacatttagagaaaaaattgttattttctacgctgtctacccccaagttccgaaaagaaccattgcagtcaaatatcagacattgctaggaaagaaactatctggggagtaaaggaagaactccggggaagccatcggggaagccattgaaagccaccaattggatatcggtagtaaataaaacagcaatcgaaaacagaacgcgttcatgatgtcagtgccccatcatctacatatatcgcgatggtatgcccttaggagagattgattctgtatgccaactgcgcaagcatggttgtggctcacaaagctctgagggaccagattttccggaaatcaatttctacctcagacacagtcacacttcttgatgccggggctggtcaagtgagtgtcaaggcgcatagccctcgtacaattatacttatcaataatcaaatggcagtcccagggtggtaggaagcatcaagaggatcggagcacagtgatctttcccaatcattttccttcggaggtgaaggacgaagttgcattcttcgcaatctatgatggacagtaggaaaagcctcaaaatgcgtcctttacactagtctcgagctgaccaatatctccagtggttctggattggtttcggatcatgttaatggctgtttgcaccacttgatcggacagcatccggagttcgaacgaggtaattggcctgcggctatcaaagccgcattggcggaagaagacagcattatgttggataggttcaagcatgaatctgccgagcctgccatttcaggatcgacagtggcattgtgttgcattaatctcaccaagggcgagctggtcgtctccaatctgggcgattcgcatgttatcctggccgagcgggaccggaaaacagagcacccgtatcacatcgtgcgcactgtcgtcaactcgaggtggtttgagcgtggatactaacaaccacatactagcgacgtctcacagaggcccacaagccctccgaccccagcgagaagacccgaattgagaaagcaggcgggcaagtcaatgaccgcagcggtacagagcgcattggtgggttgagaaaaagaactggcctccaaattgaatattaactcttgagcgacaggttccttgaacatgtctcgagccctaggcgacctgcagtacaagaatccggtgaataatacctttacggacaactccgtgctggaccccgccgcgtcggctagcagccgaacggagtctcggggcaacttcctatccaatgacccctacatctcgcgacggacactgaacccagaccgccgttacctgctcctagtggtgtccgacggagttactgatcgattggacgacacaagcctggttcagcacgtgatgaagttgtcgatgcggggaaaacgagcgaatgagattgcacaagaaatcgccaccaatagtgcgaacaagcctcacagtgacaatgcaacgtgtattgtagcgatgctggatggaagggtatcgtgagatgtagaatattacctcaatgccacaagatatactccgtacttatagtcctagagtagttagccgagttgggcaaagttccacccggaaaatgttatgcagctgtgccactcatggcctaccaacggttcgcgccttccccaatgaagaaggtggtttggactattttggaattttggaatattattatttcctcatattaaaatctttcgactatttcttcttttcgattgttcctccgagactggggggaaagaaaaaaaaagaaaaaaaatgtatgcaaatcaatcgtggcgtatttagacggagaacccttggtggaatctacaaactcgaaggaaaacttggcttctccgcggcttccaagggttttgtactttcgtcccattaaatgatgcaatttgaattttatattgtataaactgaatctagaaccgcagtgcatatgcaccctctgcactccgtatcaaatgctacaatcggatcctccgtaacctcccccgccttccaagggtgccttatcgcttactgtcggtccctgttttatccaaccagacctcgggatccttcgtacaccaatggagctaccgttgaaagcagaggctccgacatgggggggcaggaccggtctgttggaaacctgtcaaaccactttaggcaggcgactcagtctcggggtggagctggcaaaaagaagcataagatccggctgtagccaccttccagaacggtcattcctgaagaggatctcccgagctcgttacatacaaatcgcccgtctatcccacgggttttccttcttcccattcaagtcagatttttccatttctgttgcgttcaggactatctttccatatattggatctctttgatcctgacagcaaccctcaaacatccgacatggcacccaaagaatggagcaacttccatgtgggaagagaatgtggccacctcaagtggtcccgtcgaaacgtccccaagttcaccatctcctccggtgagactgtctctttcgatgccatcgacagtagcaatggccaactcaacacatcatccgaggcctcagccatcaagacgttggatctcggcctggccaatcctgtcttcggcccgatctatatgaacgacgcccaacccggcgatgtcctcaaggtggaagtcctagaccttgaggttgctgactggggctggtccgccatcatcccgggcttcggtctgctggcagacgaattcccagagccagagatcaagatctgggagctgaaccgcgaagcaggcttcgcccaattcaaacacatgcggatccccctgcgtcctttcctcggttgcatgggtctcgccccggccaacgacgaagaactctcgaccgtgccgcccacaaacgccggcggaaacatggactgccgagagctcagcgtcggctctaccgtcttcctccccgtccaaaccgccggcgccctcttcagctgcggtgacggtcacgctgcacagggccacggcgaggtctgcggcaccgccatcgaaaccccgatccgcgctaccctccgcttcgaactcctcaagaaccaaccctggatgactgctccccagttccagactccccctcgtgcccaaataccgaaccctcttcccgaccttggaacctatggtgctctcggtattgctcctgacctatacgaggctaccagaagtgctactcggagtcttatacaatggttggtgcagactaagggtctcactcgcagcgaggcatacatcattgctagtgttgctggtgacttgcatattgctgaagtggttaacgtgcccaactttgaggtggccatgaccctgcccttgggtatcttctcttgattttattgtcgttctttttcgaaatccttgattagtctcaaggcatatgttgacgtgataccctcctgagaatatttgtgatttcatttcggttgggcatatactggtgtgattggggtgatgtatttgcatgattcagacaagcgttactcaagcgagcattatattccgaatacggagtcttcttttgatcgagaaatagctattccatccgtatgtgccgttgcattggcacagtgccttttctatcctgggcctcttaactcgaagggcttgattctggaatcctcattgaacaaagtgatgtcctacagactgtaacgaggtccacctaaaggggaatattccgcttgatcccgggataacccttgatacgaatccaccaggatgtgggtactgcttcttaggcgtcgtgtactctgtcgtgacggtcccaaaatattaaaccagtggggtccggacatgtgtggatagccaaattggcccgtgcatcgatttatattgtctgtcatgtctgctgttagacactctggatgctaagctttgcgtgctattccaatattccgagtgtttgtccggcactagcttataagtagcaattcctccgtctaagtgagtatccgattcatttcatctcggatctcaggggggcacagattgaaattgaaatcagacgacttgcctacgtacctggtatcctctacaacttggtttctctaaccttgtcgacggacatgacgtaacatcgcttgatcttctaatattgtccacgcctcgccggtaacacaccagaaacattggagtcacataggaaagacgtatcggagttttatttttggaactatcttagagggagataaggttctgcaatcggcaggttcggtggacttgatcgagaaatacatccatagtaagaaggttaactagagtcatgcataagatgaatatagacccctagggcctaggcaaataagaattatgctcaagtgataagcgaagggtaaacactaaaacgaaaatggaagcgaagcccagcacaacactttatcggacctgccttttatggactaatggccgcgtctactactatcacccatcccgagaccctctcttccctacggaatacttggccttctggaaacaatgacggcagcgcactcccgaacttcgccacataataatgggccgtgcatccttgaaatggtcaggcatgtcccgcgttgctggagcgcttgtatcagataggcaggtcgggatccggcacggcgggagacatcgggcccactcctgaaggctgaatcaaaatatcgccaacagaagatgggaaggggctttgtgaacgagtcatgcgatgatacatccgaggtacaggaatataactatctcagtctttgtacaaaagtacaaaagtaccaattccacttggttagacttttccgccttggtcaaatgccaatgtgaaatgtattattagttacataatgaccagatggctgacgttaaggtatcatcctatgtgtcaatctggtgaatttgcgtatctcgtgctgttcttagtggcacttggactcgtttatatgccgaacgagtgatttgaagcctcacctgccaatctcggtaatttcatagtggagttaggtagaggggctgtcaggctgaactaaaggggtggtaaaatgaaagccttattcatgtatcaataaatattcccattagcatgaagcttaacatttggaagtgtcgctaaaaactcatgttgattactcttcttatatagtgaaaaaaagtacgaattttgagactcaagagcagcgcctacgcttttgctgcaagaataccatcagcatataccagaagactacgcaagtgaaaagtaggcatagctatgggtaggatgccacaaggttggacataagctccctctattctaaccgcaatcatccactctacagacgtctttggggcttgccgtctcacaactatcccctcaataccatctctagggctcgtatctgaattatcaagttttcacaatcgaagacaggtagttagcaagtactccgtaccaatccattaattcttcaaacagtgtcctcaatgtagagtggaagtgtcacatgacgtcgcgttttctcgcgtctccccctcacaaacacccgaggattggcaaacaccccacatgtcatggatccgattttagacggcttgaatcatgcccagcgggaagccgtcacttcatctggctcaatcctgcaagtgctcgcaccgccgggctcgggtaagacaaaaacattgaccgcacgcgtcgcgtacctcctctcgcaccacggataccaaccgcaagatgttatatgctgcacattcaccatcaaggccagccgtgagatgcgggagcggctcgcaaaactcattggagaaaaactcgaatcgcgcttgattctcggcacctttcattccatctgtcgccgctacttggtcaagtacggatacttgatcggcctgcggaaggggtttggcattgcggattcggatgatacccgcgcaattatcagagtatgagtagtacttttaaattatatcaatttgtttctattctctaattgtcactgcagagaaccattaaacgactgaagtctagcattgaagtcaaggcggcgcaaggccgaatttctcgacataaagcacatggactcagtcctgatgccctggctgacagagccaaagcagaggagttggagcttgttgatatctatcgtgactacgaatcagcgctggccgcctccaatctcttggattatgatgacctccttctgcggtgtggggatctgctccgagaccacccagaatgtgtctcaaatgtgcaggccgtcttggtggatgagttccaggacaccaacatcatacaatatgaactgatgaacctcttcgcatctaagaaccgacggatcaccatcgtcggagatccggatcaaagcatctacgggtttcgttctgcggagatccagaatctcaagcggatgcagcaccgatattcaaacacgacggttgtactgttggaagacaattaccgctctgcaggttctatcttgaatgcagcccaagaagtgattgagcaggatacgagccggcctgcaaaggcattgctagctacgcactccttcggaaccttgcccgtgctaagaagactcccaaatcccaacgcagaggcgcagtggatggtacttgagatcaagcgatgtgcagcgatgaccggcggtctactgcgcatgtctgactttgctgtcctgcttcggtcggcttcgctgtctacacaaatcgaaacagcttttggaagggcgggtataccgtacaagatggttggaggcagaaaattctttgaccgaactgaagtcaagattcttctcaattatatgagggtggtgagccatacgggacattcggacgcgttgatgaatattgtgaatgttccgccacgaagaattggcgatgagacaatcaagcaattgactagcggtgcggagaaggccaaaattcctctatgggacttcatcaaggatgtcatccaagggcgtcgttcgactgagaagaaactacaaaaagctgcagagcagggactctgcgttctaatcaatttgattgaagcctctagacagaagttgcaagagtgcgaggatgcatccgctccacgtgttctgattgagttcattgccgaacgcctctcattccaagaatatctcatcagagcatatcccctagacgaagacagtcgctgggcgaatgttaaagaattgatgcatcaagccagtgaagtcgcagcattcgaggaggaggttgataaagaaatggatctccctgaaatcgaaggtgtgcaacaacagcaggcacatcctggcgaggaggctctcactcggttcctggcgaatgtcgccttggctacggagatcacaaccaaagaagaagccaaagagggaaaccaaccgcaagagaaagtcacgatttcaactatccacgctgctaagggcctggagtggccagtcgtatttgttcctgcagtgtacaacgggagcattcctcactcgcgtgctgaggtaatagaagaagagagacgattgctgtatgtcgcgatgacaagagcgcaggccctgttatacctgagtgttcctattcgacaaccgcggttaggagaaggagaagctggtgccaccactttgacgccattccttcctcccaaattgaccaaatcgcgcttccggtcaacggggccgtctctccatgagaaggtggtgtatgcaattgccgatattctgcgtcgcccgcggccatctttagacgacatttacaaggggctcgagtttcttccatcgacgctggacgaccgatggacacccgagggcgaggaggaccgcagcaaattcgatggcacatctacctctcacgacgcgtctggcgagcccaatccaaagcgtcggcgggcagacatgaaccagggtccaaaatcgaccacctacatctcatcgaccgggtataccatgaacaactcgacagggtttacgattcctacaactggtctatcgggttttacgtctgcccgggattacatagcggccaaccccgaaccccccgcggagtcagcctcaaaggctgatgcagatgcagatgcagctgggacaaatagaccgaaaccgctcagcagcgcaagccgtaaagacggactcacacaggcaagcatatccaacttttttgcaggcccaggatcctcccagaagagggaaccagttctgcctcgctatccacagccaccaccgcagaaccaacgctcaggggcaagaagcattgtcccatctaccctctcctctcaccgtgttcagccacgaccacttattccaacaaggccgaccctggagcccacggaccccaatggttacacgtggctggcaactccatccaacccaacaaccctgaaagctgccaggatgtcgaagatgcaggaacagaacggcaatagtacatccgcaggcggaacagccggggcagacgaggtgaaacccgagagctccaccgggttccagccggtgtcgacgtttcacagcacgacgatgtcaatgatccaacaagcaccgcgacggacgttgggaattcggcggagcatgaacgggtggcaagaccggatgaagcgcgagggcggtggacaggcgagctgacacgatttacgatttcaggggaggctggttctagaatcctgacggggatgggttatgtttgtccacgggaccaggtcagaagggcagaaggggtcaggcaatccacacgcttcgcaagcccattgccggttcaggcgttgctagggaagccctcccggggtatacttagcttggaaagtgattgaccaggaaagggttgactccagggccagaatctcggtctagatggaatgacgcacatccgtgcactaccaactagaccatgacctgtttatgcattgctctatagggagatgtatatgtacctaagtttcataattattattttccccatgggatgacccctgtatgaactggggcgggcagatcttccgatggagcctaatacagattagccaggctgaggattatggacaaggaacagagtgtcgatttgcatacacaatgatcgagacgtaagattctggaccatagtggggttccaattacggtgaaagaatcaatagttagccagtagcatgtcgtacaacatagtatgatactatatacacgcactctgtacagccgccattgacgcatcctagcggtgtgggaagcgaggaatcccctcaacgtaacgatttattattatttggttagttatttgctattttagttacacgaccagtccgattctgtaaataggacgaagaatggctgactcatcattattggaaatagtaccggcacaaagccctagcaacttctctccttcatcactggctgccctactttcgatcgaccctctaggccaatcaatgcttcgatcgtggcagccattaccaggcaccaaatacgtcagggggagatgatccattcctagctcttgtcctcttttgggactagtgagctgctcgacgtatgttccccagagtgtagatcggggcgaagctcaatgcggaatggcttgctatacaaaaagaagtcgtcgccctcgaactatcacttcattatcaaccaaactacagcatatcaacaacatcactattgtcttctcttatatttttgtcttcctttataccttttatctataccttttgtctatatcttaattattgtccttataatctcagttcaacactgtgcctcacgctcgacgcgttctatacatatccgttcatctcttgatctttttacctttttactctctctctttgctctctacggagtacctctacctcttttaataccctaatatccctcttcctcgccatacgccttcatctttacctcctccaccctcaaactacatacaaaccattcctaccattcctccacaatgccacacaaagtgaacgactccaattcaacactagccagcagaggcagcaacaatgatcaggtggtggccaccgaagtccggagtatgtcaagtgcatcacatccctgtcccgatctccagattcagcccgagctaatgcagaccccagcaaccaatcccgtccgcaaacctccggtgatcgttcacaacaagggcggccgaatctacgatgagacgcggccatctgactgggacaaacaacgctggaagtagttgtcctttacagttcgaattgcctacgtccctatgcatctcaattgctacatctgcatacggggcgttcggctggagagcgagacgcgaataccaccattttacacgcgcgttacaaaggcgaaaagggggtccagactaggagaagagacgaaaaagcccagaaaaaaaggaagaaaagtgaggcggtgatcgaccaagatggttcgcggagatcattggacgccaaaacccccttttttcgctgcctctcgtcaccgcttgacgctttctctttcgcccctgaccagatcgggctgcttctacttttcggattcctcggattctcagggctttggtgccgtttcttcccttttttgacttgtccatttgcctctccccggatttttcgcgtctccactcttccccttgtatcattattctggagttcgtcttccttcattcctctactctctactccccttcccccttctactttctacattctacccttccaactctactggttactgttgaacacgtgttttcctctcggcgctgccaccaagcagctagctgcatggtcatgctgtgagggctaattgggttgacacccttctatttgtttcttttgtttcttgcgatgcatagcgtgggtattactggatctgctggacttggatttattgcgaatgagcgaaattgtattcttaagaggaatttgactgtcttattatctagatcttccctttatttgtgcttctttcacggagtactccataccgtaaacacggtgaacgctggccagaaacggccgctttgacatcgtattaggccgccgtcgtcggtctggcgtcaagtttagcaattaacacggctgccctggttaaatgcctcgtgttggccgtgcctccagggttgtatatacagttatccgactcttcttcaattctactggaagagggaaagagcgatgggaatacaatggggctcgaggaaacgaaccttccctgggagtttctttaaatcaggtaggaacgatgcacttccattgctttcctttgtccatgtgatctatcatatgcagtcacacgcatgtaggtctcgtcttctgacgacctatgcgatatttaatatgtggcattgattcatccgcaatacacccaccccctcgaatagaaagtcgatgctatcaaataaccaccttccattatcatccaaagatcccatagcatgtgtccaacatttcatccattcgaaattagttcgaattgtcacgtccgcccgatgcctgaaaatgagcacgagtcgtatcgatagacgccctgtcaaattgcggatcttctacgatggtagaccggtgtttggtgcaaagtgcgctagcatttcctatatgtgactgggcatacggagtactgtctcagaaattgccgtttgatgcaggcctcggtgtgtctaacagcgcctagaaatgaagcatcgaattcgggagagtaggtggtgcgatagatggcatgtcctcagctccacaaaccgtacattctattactgagctcctccataattgcggtggatgattgtaggtggaatgtggtagggttcaaccagcttcaccaacagccgcttccttatctccggctaacaccgaacgacttgaatattattcctagacccgagcgcttttggaataaagcatcaattttcaatcttattttaacaatgtctaatagactttcagatatttatagtcttcgttgtaaaaaaaaaagtggtcaatataatatatacagggcttcgatgacagtaaaatatatatatgagaccttgtccgagtggctggatatacattttgagacactagagctattggtggaaagtatctgggtatatgccactggcaggatatacttttattgtgaaaggcaatggatatgggactgaatttcagacaagagcagcgcagagagtgacatgccgttgacataggtacggagtagaaatatggctaccatgcagtagctcgcagaaaatcccaaaggagagcacaatacggagtaccctacaagaacaaataaagactacaatttaaagcatccaaaagttcactgaaaatgggatatatttcagcgccgagcggtataccgacaccccattctcaaattcacataagaaatgaaagaaaaaggcacctggcctgccgcctcccgtgatggatgacggacaggcgttcagggcatgtgtcaaaggctagatacaaaggaaggggagagcgagggaaaagaaaaggcatccgttgattccaaatatggactcggacacccttcctccccagaagacatataattttttccgggttttcacactttttttgcttttttttgtgacctccatgagaaacgaggcacattaaaaacgggtttgagggggggttttgaggggcggggattgggtgttgggggcgcaattgggaaggcagtcaagctgctaaggattgtggagcgcagggggaatggggatatcaaaaacgcagcaccaattggcgcgcagaaatacaaagggtcaaggtgtgcatggtattccttgacagagaagagaagttaatatgacgaggggagtgaaaaacatcaaactgtattcttgaaaaacaaataaatcaacatggctcgcgctcgcaatgctagatggtaagtcaagtgcaacggatgacccaaaactaatgggtatgggagcaaatgggtatgcaatttttggaacaggaagtgaagggctggtctcgactctggttccgcagaannnnnnnnnnnnnnnnnnnnnnnnnnnnnnnnnnnnnnnnnnnnnnnnnnnnnnnnnnnnnnnnnnnnnnnnnnnnnnnnnnnnnnnnnnnnnnnnnnnnnnnnnnnnnnnnnnnnnnnnnnnnnnnnnnnnnnnnnnnnnnnnnnnnnnnnnnnnnnnnnnnnnnnnnnnnnnnnnnnnnnnnnnnnnnnnnnnnnnnnnnnnnnnnnnnnnnnnnnnnnnnnnnnnnntcggaggccgaatgcaaagcgtaaaggacgaaagtggacatagtcgagttcgggggatatagcacaggtgaacagctggtatggcgcattgagtattaagatggaatatcgaggtagatcaatgcgcaatcggacgctccttggaggcattctatgaagatgagagaaatgaaatgaaatgctggaaatatgtgcaacggccaaatttcatttggtttgctggtcgttccgtcgtttcgtttacatcccaccctgatatgtctggcacattcccatatgggtaggtgccagagggaactgttggagtgctgcttgctgcgccatgtacatagcctcctgctgttgctggtatgcttcactgttcatgtattgcatctcagcggatggtgcgggggaaggggaacagccatggtgaccagtggccattccgcggctcatatcgtgattcgccatttgtgcatgggcatgcacaagcgcctcgttgtccggggtgatgggaggagtgaggtaaccgtgaggaatagctgtcaactgctgggacttctgaggggtggcaagaccaatctccccattgtacggcttggactcgataggagtctcgaccggaggggtgcaacgggcgtaggttgccaacgaagcctggcggttgaggaagtgttccatgaccttggagacccgagagtagtgagcggaagcgtacttgcgggcgaccacggtggagggctggtgcaactgttgagacaaggcaacgagagtcatcgagtcatactgcgatgaccaatgggtatgacggggctgaggccggttaagaatgcaacgtgacaatgcaagagcggcacgggcaagctcagacgatagcttggcgacaaagtcccggtggaacaaggcaatctccaggatgtacagagccatgtgttccacctcggggtcgtaagcatcatccaagacggcgtgctgcaagaaagcatccacagttgggtgtccaatggaccagccaagagtttggaggacatgccattccatctgggtgaacatatcgtcgtcgtaaagagagcagcacatcgacttcaactccttgatagtggggacgcgatccttcttgtcattgtacttggccgcgatgagtagagctgcacagccgaccaactggtagtgacgcttgtagaccacacgcttggagcagtatcggtctaaaagattgattgccaagaacaaggtggatgggaggagctggaacgcagtgtgggcctcgatcaagaagtcaagaaggtacggtcgcataaaccactggatctcggtttggatgtcaatggactcgacgtcgggcagggtttggttctatggcggagactaggttaacaacgtatagccttggagagaaaccaagggtctggtcactcacatccatttccaacatgtgactcaggacatcgtcccgaagctgctcgcttgtgagattagatagctcatccgccatgacgtattgacgctcacgagccatctgcttggcatgctcctgtttcgcttgccgttcttgccgaatgcgactttccatgccgtactcttcttccacgaagaacgtgggacaaggacggtagttgcgatggtaatccatgattgcggaagtacttggatcaaccgaagtatgaagcacaagttgacgtatgagctttgtattggcgagtttcaacgaaaggaagcctgaagaacgggtctatcaggcaacgacggaattaagagagtgacagtcgtgtattagtgtattggaatgaatgacggagatgttgtaacgattaatgaatggaccagctgaaacaatagttcgaactgggaaaggttggccgggaggtccgaggaggatgtcttcgaagggaaggctgaaggaaattaagattagcggaggccaatgtaagaaatcgattaaaagattgtaacgtcaaggtgacaaaagtaagagagtgtggaaaggaaaagcacaagaaggcagagtgcagagatgtatgctaatatccattcaggagacgaaaagggtcatccttctgagaaatactaacccagaaaagagccttcgggtagagggcacaatgcaacccttaccgtgacggcaagactggcatctaggcaggaatgatccggtgaattaggattctgttggataccaacgaagagatggagtacgagtcaacgtcttcacccctaggctagtgatgtggaatgtggagtaggagaacaaccctatgaagggggtcataatcatcagggggatgtcttggcaaaggaatggttagaactcacacttcacagattaacgagttgaatgaacaaggctcagtgaagagactgatatagtttctgagatggaagtggtgaaggatgaagtccacgtcaagagagacaagtggatttatatcaaatatgaagatgaacaaattctagatcaggcaacaatgtcagtcatattcattaatagttccatcgtgatagtcaaggctccaaagagcaatggcaatcaacgattgacgccaatcaacaattaagtgcaatgaggtatgtggtgccgcagcctgatcggcgccccaacatgcggtatgtccagtaagagtacgggattttcatcgaccccttaaacttcccacgccgggagatatagaagcagccacaagcgctggttggaccctgagattgcatgtcaagcattaagatatgcattcctcagttgtatctgagggcatgatctcccgtctgcatggacggcaatctttaccgctcaataaagagcaacccctccatatctggctctcggtgtgttgtctcgggtgggaaatgcaaaattggaggtaaatgaggttggggctgctggattgaacatggccctgaggccataccatgattatgttggtgggtcgatttttcatgcactcattggaagggttttttttttcgtgtggaaatttattgaatctcatggctcatgttgagaaaattcgagtatccgttgctcgtctatccatcggggcgttccgatcttgacaaccatgcacacctcaaagtaccaagaaaaaaacaggatttcttacccaagttttgaacgtcaatgtctgtctgatacccaaaaccaatttgtatcaaccaaaagtcaacctgaatgtgtttttcctacactgtcgctcgtctaaccggcaggagctggaacaggagggtccaaaaagtccgaggatcagggagggcaccgggcggacaagaacgaaggatcgccgtttgagttaacaaacgtcgaattggagggtcaagtgcgaaggtcaaatcgacttgacttgagtgctagtgcagcgggctggaggagatcgactggaatgtcgaaccgtaactcagccagtagaccagactcgtggtctccgcaagattggcaaggaggaaaagggggaagagaaaagggtatgaagaagagaaggagagaggtacaaggaggaggattttgactttctctctccaggcgggtggtgggaagagaaagaaggaaaaggaagaggttaagaagctgagaagacacggagatacacacggagagagctggttgtatggtaatccacgagacagagagtggaggctgaaggttgcgtacggtaaccgtatgatttccagaatcttaccgattgtacctctggtacccagcatgtatgccaggggaccggtaattttgataactagggcttcgtctctgcaaggacaggagttgaaacctacttgcttgaaaccggcagttacatatgtgttattttaaaaggtcggaggtttcaaacgtggaacaggcacaggtacagtatgcaagtgttgaagtagctacagtaaaatagcaaaatagcaaaatagcaaaatagcaaaatagcaaaatagtaaacagaaattactcgatagtattcatacctacaagcaatctcaaatgcgatgtatctacgaggttgcatatgctataactttgaaactcgaatattgcgttttcaaccgtatgccgcgacccagtcattttcctagactagtaatttgaaggacttctgatctccgacatttcgacatttcaactctcaactgaaccttcaacctttcacccatttcaaagcctaccatttccccgtaaatcgcctttgatcatagtacaatctccaattctccgaaattcaaccaccgcgtttccctatttctgatcagacaaataaagaaaaagtataaatggagccaagacaaccgcgagttccggccccaaaaaagctcctgatcgacaagtattaaggccaatcctcaaccattgttggctcgtcatccagcaccttggttactagtgctgcaatgggctggtgtggctctccctctaactccgtacgaggcctccgatacggtcgcgcgttctagggtctcctgcgcctgggcgttgactggtccagaagcctgggattgccctgttgacttcatttgggcttttccccattcgcgtacctcagcttgggctttcctgaattgataacccgagcctcctttgtcttgcatgaatctgactatcctgcgccgtccatgtggggatatttccaagcttcggttttcggtcgcaaaagcaggatctcgcccgtaatttggacctccacgtttccatttctttttcttgctggaattggtttaattaatctgactgtcactatgtatatagttcactaactgttttagacactgcgcatgtaatttactttctcgtatacagtatcactttacaccttcatccctacaacgtctgccgcctgtgacaccactggagatgcacttgattcgtccccaacttctcgacccgagataaggttcatagacgtctcatcaagattgactggtttagtcttgagaatgtcactttttactggacgcgtatattccccatgtcgatctgcgaatcaatccctggtactaaagtacacaattgcgactcggagctttttacttatctccccttacttcatccccttacaatgcacaatttgaatgagaaccctctgtaaggtccagggattaagctcagccactcaattgcatatcagaaatatcgatcatcatgcgactcggccgtttctcaatgacatgcacaggatgcgtacacaccaagtgactggatacgatcggtctatactattccggagcacggagtaaatgcagcttgatatacgacagcgcataaggctttacatctagcacggggtagtggatccatacgtttcacttgctcaacttcaaggaatgcgggttgaatcattggttagcgccttttcattcaaactggaaaacagttgccgaagcaatgggctatcgacggggtatttccacctcgtgcaaactaacagggaaacgaagggggaaaagataagcgatggccattgaagggtgctgtcgagagtcgggactgtacaacgtcgtaaggcaagggactgtcaaataagagaactgaatgatagacatggctgatatgcagaagcagatcacaaacacccttctacaaatttaggttcgtgttataaactcccatctcatagcatgccagggacttttgttgtcgcgccatagcagcagttaaatgaatcgccgaggctttgattggaataatatgtactctagataattgaacagagtacctcttcatccttgataacctgtcagctgcagaggaacacgcctagccttcatacttgcctcggtgagtctggcccgtatgttgcgtcaatcaaagacacccatatccaaacactctcattttaggctaaggtactccgggattccacttgatctgcatatatgatccatgccagtggatagcattatatacctaattatatacttctgttgcttgagtagttcgccccaaatggcggggatgacctgtactacccggtagatggtaataatatcaaaggacattattgggtgtaccacctgaacacaaacctgatacccgtactccgtatagcctcctaaatcctcgcagcaaggcaaacttgaagaaacaattggactaaacacgcccttttgtaaagcggtctaagggaaaagggggctcccatgcagcaaatacgtggtcgcaatggggcatatcccactgcagccgcgcacagtctcaggatcaaatcagtaagagatacgagttacttcgtgtccacaaagcttgcccggatggcttggaaactaggtacgacctggccgatgcttccgatgcgcccagccggcacgctactgtacctcctgaaaaggggaagaagagccttgcggtatgtcagcttgccattttcgtcccctgactcgtgtctcgccccatgtttcaagtaccgaccgtaggaagtcctctagaggatgagagtaagtctaaagcgcgcgcatatggcgatggacataatttgagtctggacctgggctgggaattctattggccccggactctttagcttcccgtggcggataagttgcaattttatctatttttgggtatgagtctgaacctcccatttattttagtcttgggcattttgctcgacatagttctttggatagagaattacttgttagaagtgcttgattggattcaaggagtgactgatccttgtttgtgaggtggttggtaaaacctcgctggcaaacacccatgcaagtcaagtcttcaaggaggcgtcacttgtctataaatgagagaaatttaaataacctgccatcgagtggtttactgcaagatctcacccggatgggcgccgaacatgatggtggtttcccttgctcatgactctgcaaatcaagagacagtaatataacccttcgatttccctccacgttgcttatttcacttgcagtccgcgcagtggatatttcattctgtaaggggaagatccttcccagacgtcaagccatctggaaatctgtttccaatgtagatcaatgttctttggcagatgttactcgtttgttcgagggcggtgtggactggatattaggtatctcatcaaatcatgtaccagttgcatgttctgcatcaaatatcatcactggtaactgatatatagggtattcatttccaagtggatattacaagcagtctatacacacaatacaagcgcgatctgattcatacttgatatcccatatcgatacattccatactcccgaggtccgtacagggtatctagagaccaatttccgagacttgcagtagtctagtataatacagcccacagaaaaatctaccaacgaacccggcaaaacgtaagagtggaatccgatcttttttcttcgcctcgcaatcgttccaccctaacctgagaaattaacgcgctccggcatcacacgcctgctaaaccatggaaccatggccaatgcctcggacacagaacccatggacgtaaccagaactccacgttcaacagcggttattccagggcccgtgccggaatatatcaaccatggtactattgggaaagaacggaatccttaccgctctttgcgtcctgttcaccgtccattgaacattgcaatatggtctcaaagtacgtggtatggagccctagagtacatctgtacaaactcaccgttctcttccgccccgccatgtttgatagttttccgctccaccgtctgcctagatgtgcaaaaacacaggtggcggaattggctgttatcggatagcacggataccgtacggagtacgcacaaagaggttgggattgtggctctattctcggatatgtttctcacgtgtagagcaacgggtacagcgacggggggatttaataatagctaatcattgaataaacttagaatttaacgtacatagtcctatactgttgagattatccattggaattgaactgctagatatccaaatacatccccgaacctcaatttttcccatgcgtattaggccaaaaggctgcattcttgaccggtgaaaaattgacgtttcgtggcccctctgcggggagttatacaaatgccacaaaggtttttctgtgtttagtggaaacagctccactacacgggtttttctttcttcttttcttctttcttattccttaggttggagaagtttctaggtggttgacatggtgcagctcatatggaatactcggaaaccctgaaatgtataaagtatgttgtagtgcctcggatttacgtacccctaatttccgaaatcatctccgcaggatacatgtcgtcattcgcatgtataatcctcactttttcagtgctggcattttcaagacggtgaataattgtccagcatacagaatccttgcaaagctccaccccgaataagccctgaaggacgatgctaattactaacgcggatcggggattcgagacaagattacccttttaggtatggttcaacatacacagcttgactggggcagcggaggctcaacccatggttaggctgtttttttcactcccctattccccgccccttttctttagctttctttcaattcaatttgaaatcgccactgcatatcttatgtggccctcttcatagatagggactgtaggatacctccgaattccccaaattggatcaattgacctatgtactattcgatccggtttttcaagactcctccattccagacaggctgagacagcaaaggtaatcggagctgcaaggctgttcattacgtcgctaaacctgacgcggcttagggcataaaaccgagtggagaatacccgtagtgtaaggaaagaaaaggtccactttgaagctttacaatttcaatgtaccggttactgtacgtacaaaatacaaatgtacctcgaaacctgtccgaaaggggataaattgatttgtacaggatttgttgcctacgggctttgcacggtacgtaactgaatgcgaccgaactttgaacccaaccctaacgaacactcataaatagcatcttgcataagattacgattacacttgtgcgccatgtgtctgagtggcacccggcatagtttagtctatgccatcattgcccggctcacgtcccgcacttcttgctttctgtattgcggttcgctttattgcaatcgaccaaggtttgcaggaagatgtataacatacaaattgcctttccatcaacgcatgtctttgtgatatgtgtccaaaaaagggaatagttgattcccttctacagtgggcctagaacagacatggggttggccgctcggtcaccctctactaaaggcaatttggtttcatcttggcgcgaatcccagcaaactctcgtgtgcatcatcactgattccaaggtcgtgtttatattgccgatccggtatctttgttatccgaggcaaatctgacactggcctagataccctcggtcttaccaggaaagggtccaatggggaaggtgcgatggatgccaaattggagctaatcgtgaactataatatgtgagttcactaagcctatgatctgacctcatcatccccgcagcacgcgattccacgaggctgcgcaattaggggctaccggcttgacaaataatatcatccatgtcgcctatgtacaccatacatcacgtatcgggactgccgaagagttccactgggaccggagtcaaagatcgcggtccatctcagctggatactgtacatgtgtaaacctagcttgcaccgcaccggcctctgtaaatagagacaatcaagcacaagcatagggacaatttaattgagttcgatgaccccggttggcaattccttccaagccaaccacaagcaccggggataaaacagaacaaagcaccgaggacaacatgaacgtgatcatccaaatcaatgaaatgacatgacaagtgtgtgttgtatttcccggatatcaagtgaactatcgaatccatgcgcccgaattgggtccgagcccatgctgacaggggtctccaatatcctgggccgtccccgcagctgttgctgtaacgaagtggaatcccgcgacgcaactcgcacaatcaagactatttcctcggaaatgtttcatgatgacacggaaataccacacacactcgaggttgcataaggcttacaaacgattcgagctgcgccatgagggcccccgcagcagatgtcatacacaggtcgccttatccgcactttgattcgagatcgtccaatgaagacgtgccaattcatctcagcctcccctgttctttagctcgtccatgcccatccagtcatatgttcccattgcgattatatgtgggttgcacactgcagagccaagtaccgtcgcgacctatcagagagtttatctgcaagtgtctcaggagcccgatacatgagcacgcataacaggttactttctcatcagccacaacagactatgtcaagctaaatgatggctgcttctgacgtggcagcccgtcgatggtctccctgccctctgccgaagtaggtcataggaacctgtcgcacccatttgctattgcatgttactattggttgcagactgcggcgcgcgtggcgaacttcgtctactcgcgacatgttcagctgagcctgcattttcagggcagatcctccgctggctcccttacatctggcatggtaatctccatatacattggcctcgatagcacaatacacttcatgcggcccgctgaagtttagaactgggctacagctcggggttttagtttgtactggccgaaacttgctcgggtatccaatggttccgctgcacatttctgagctagactacgacgcgaactcaagttgcttatcggcaattgctccctggtcaatatgtgcatagagggttcagtatttgaccgcttcttatcggttggtcgttgcagttcactcgtctctatctatgatggggagttgcaatagggagctcgaagatatcctacaactttcgtggtgttgcacaaataaaatattactaagactgtttgctggacaagcaaggcacattggatatatagtggttgttgactacatacgttctgaattactcgatcacacttgtgtcaatcctatctcttgtacaaaatttatacatatttcgatgggatctatgtcctgacctgtatctaggtactaacccacctcaggaaacacctgtatttcaattggaaataaagtctactaagagcacatctaatcgatggaacaagttttcactacagagattatcatcgttattgtttgttcttctcatcatgtctccagatactggcccgattcgtaaggcactatatctcaatgacttacttacacgtgatctcgggaaaacctacccaactagtcaagatattccggccgctaaaaattatctacagaaaaaaaaagcggcagcgcaacagtcgcaaggaaagctttggcaccacgctataaccacctatttgtgtttaagagatgactgtctagaggctggttttacagcctgagctgaattattcttgaattgatcttcagcacctccattctgatttgcaccccgttcaaaactatccgaaacgagctctctggcttcgaagcccacatcttcaatcatggatatccaccgctgccgtttcgtttcttacaacccacaggcgatcaatgcacttgcattctcgcaccccccgtcagcagatctagctggacgtggcgtacccaccctccgactcgcgatcggtcgtgcgaacggtgatattgaaatatggaatccgatgcgcggcgcctggttccaggagaccgtgatgcgtggaggcaaggatagaagcattgaaggacttgcgtggacactggatccccaggaggatgggcctgatggcaccaaactaccaggaaagctgcgtctgtttagcattggatattccacggccgtcaccgagtgggatcttgagaatggccgcccgctgcgccactcaagtggaaactacggagagatttggtgtcttgctgcgcagcctcgctggcaggcgactaagggcaaagacgggaaggtggtttctcccgccgagggcgagtacacgggtcagcacctcgccgcaggatgtgcggatgggtcaattgtcatcttgtctactgccgataacgacctcaagttcttgcgcctgatgcgtccttcaacaaaaagagcgcgcgtcctgagcgttaccttccaaaaccgcaataccattgtcgcgggttatgctgatagttctatccgtctctttgacattcgcacgggtaagatgctgcggacaatctccctgggcaaaggccccacgggtggcccgaaggaattgttggtttggtcggtcaaatgtctgccggatggcacgatcgtgtccggtgactcggctggtgaaattcggttctgggatgcaaagaactattctctcttccaacggatacagggccatcttgccgatacgcttgatatcgcagtgagtgccaatggagacactgttgtcagtggcggtgccgaccagcgaacggtcgtctaccgcaagaaggagggcgagaagggcgataagaaaggtcgctgggctgagattatgcaccgtcgctaccacacccatgacgtcaaggcatttgctgtctatgaaacaaaggatatcagtatcgctgtgtctggaggtatgttgaccttggtccactatgaatttgagaggttcaagcaatgctaacttgtttcgtttaaaggtcccgatgcaacaccaatcattctccctcttcgtgaattcggaaaggaacaccaccgcaagctttcgagtctcccgcaaattcctcagctcacctccgcgccgtcagctcgtttgattatgagtttctgggatagagaagtgagcttgtggcgtgtgtctcgaggccctacgtccttgcatgagaacattgatggtcaacggcataggctcgttggtaaggttctgatacagggcgaggaaaacatctcctcggcgatgctgtcctcggatggcaagacgctcgctgttgcaaccattgccgaggttaaactgttttccctccgtcggagaaagggcgacgagaagggtgctctgcgcatccagaagatcgatgtacccaaggtactttccgatgaaggtgctcgccttgtgaccatttcccccgacggccgatggctttcaatcgttcgccccaacagcgacatctacatggcacggatccagcaaacctccgcatctaatgagaagccccaggtgatgccacagttcgcaaagctcaagagagctgcacgtcatgtacgacacgaaaaggcatcccacggaacattgggcgattacgagagaacgatacgatctgtggtgttttcagacgacagcaaggttctggcgagtggtgatatctctggttgtgtcgatacctgggtactaggcacagcgaccgcacccacgaacggtaccgtcaaacgtagcggggcttcggagtcggacgatgattcatctgatgatgaagacgacgacgacgttgtgattgagggcgagcgctggactaccgctgccactgaatcaccaatccctcgcatgaattccagcataactttgttgtccttccgtcctaagtccgcccccacacaaaagcttctcgccaatggcacgcatcagtctggcgaagatcggctgatggtcctcacaagtgagcaccagctcatcgaatttgatgctcgggatggcaaattgtccgactggtctagacgcaatcccaaggcatacctccccgcagagttccgaggcgttaaggaccgagctatgggctgcatgtgggatctctttgagggccgtgagcgcctctggctctatggagcatcatggctgtggatgtttgatctgctccaagacttcccctcccccgacgaggctgctaagaccgaagagggcaagaccgcaggtcagcttgtcaaggcgtcgaagcgcaagcgcgaagccctcgacgatgacgaggaagagcggaggaaacacaacaccggtgccggtgatcgtattcctcagacacagatggatgtccactttggcaccaaggtccgcaagatcgtcggcagcgatgaatcgcagggagaatggatcaccctggacaaggaacgtccccgcgtgccaggcgaagatgatgaggcctacgagtacgacgagacctttgcagccaccaatgagacaaccctcgccagtttaagacgtggagatgggactgcgatcgaaaccggaactccacaaaagggatcacagaagcacactggcgagaccaagaagcagctggtagaggccaatggtgcctcagctcagcctgcacgtcggtggtggcacacctataagtaccgtgatatcctcggcatcgtacctctcaacaccttgtcggatgacgattccgacgaccagagaccgagtggaactttggaagtcgcagtggtagagcgacctatgtgggacgttgaactgcctggccgctacgtcaaggactacgagtgaagcagagagatgtgaaagggctttctgtaaaaaaaatagaatgcagctgattcagatatgtaatttggtttgagcatacttggggagcgcatgttaccggcgccttatgtacagggattctgaattgatgattaccccaaaaacaatttgcctataactagtggacttgtatattccctgtaatgggatctaaatatctcaagtgaagtacaaaagtcacaaaggaacagaccaacgacgatccagaaccagtgcggggcctttaggcagagtgactttaacctccgaggtcaggctcaactctcacttgacctttaaaacttctgtacaccctgagccagctgatctttctgaaaagcctttgatccgctgccctacttgtctccgtgaatcccgaatctcatcccgatccgcttatcggcttatcgtctacacgtcagctccaaggctgtgaagtccgacgacacatcctcctccttccatagcccgtctgcaagggccagggatacttctatcatatatcgagaaaccctacatttgccagaacataaacgctcgaaagattcattaaggaggtcaacagcaggactgcagcataggtccttccaagtcgaagtcagggcggggccaactactgcatacattcgaagaaagcaggcaatcacgccaccccttttcaataaacggacttcctctatattcaagtgttctctgctgcttcgaactcacctctcaggccctcgactccgatctccgatccctacagaaacgcatcccacgcctgtccggcaataaccgcataactacagccatgggtctctcatacaacgtctacttgactgccaataaaatctttggatgtaagggatgcaagactcatcttgcagatttcaatgatattatgagtcgggtatgagaattcctcgaatcctatacacttccctactatgaataacctgttactaacccatgcctttcgactccctagaactttcgaggccagcacggaaaagcatacctcttcaataaagtcgtcaacgtcacacaaggcgaacctgtagagcgcaacatgacgacaggtcgacatctcgtgcgcgacatcgcctgcagacagtgcaaggaaacggtaggctggaagtacgacaaggcatacgagagcagcgagaaatacaaggagggcaagttcattctcgaggaggagctattctgtgtcgtctgttgatgggtgtgagactttccacctatcttcatgtgtgtcgaccttgatcttcgattcctgcacctgacaggccggctggtggttttatgataagaatgggattgcattctgtgagcatttcttgtatttttgttctttgaagactgattcttgcgacttgttttggtctatctttctcagctttggtgtttccgaaaggcgttgcgaggagtatttgcttttcttcattcggtttctttgggcccgatgaaattggaactagctgcacacttgcagagcaggacttgcatgtcacgtcggcctttctgatacgtcctttgaatacagtttgacggtttatctctctcccgcgtagcatcaaccatctttcggagtatatagtctgcttggaatggtagctataattccgttgtatccacaaatccgtacaacatactcctatgagaagaggagccagctccatctatatcccattttggcattttcagtggagatcaaccactgtagtgtatcagccccaccaggtgattcgcacagaagcccgaaactggagaaattagtccatagatttctttttaactcattcggatccgtctgcaatctgatcgttcgatgttgaagaaatttgacttggaaaatatccactattattacagctgactgtgaattccgccaccaaattccaaagtaggttgctgctctcatacttcgatcctctgtgaaagattgagatctgactattgttagaatgactcctgctccctcggattctggtatgatgcaggcggtcgtgtttcacgggccctacaaggtcgccgttgagcagaggcctattcccaaggttcaggacccggaggatgttatagtcaaggttggatatactgcgctttgtggaaggtgggattgatctatacttttcttgcgaaaaggcccatgctaattttcgtaatattctacagtgagctgcacatgttccgtggcgtggagcctgcaggaaaagatttcataatgggacatgaatttgtcggtaccattgtggaaatgggcagcgctgtcaagactctacagaagggtgaccgggttgtgactgcattcactacttcctggtaggttgtatgctcattatatgctggttctatattgcaattgtacgaatgttgcgctgacaccatgatagtggcgaatgcttctactgcaagcaagggtggtcttctcgctgtgataagaacagtctttttggatgtgacagcttggacggtggacaggctgaatacgtgagtttctaagcatgttatagctttgctctatatgctgatattaacaggcccgcatcccgaatgcggaaggttccgtcatgaaggcccccgagggcgttgacgagaaatatctggtgctcatgggagatattttccccacgggctggtttgcagcaaacaatgcattcaagaactcaaccccgcagcaaattgctgaacagacagtagtcctaattggatgtgggcctgtcggtctctgtgcgctcatcaatgctctggagtacaagcccaagcatattctggcggttgactcggttccgtcgagactggagcttgccaagtcgcttggtgccgagccgtggaacttccaactggaccgggctggtctagacaagcgtgttcaggagttgacaaatggacgtggtgccgatgctgtcattgaagtcgtcgggttgagccctgcattgcgcactggctttgaactgttgcggccttggggaactattagtagtgtgggtgtccacaatggagaggtaagtaggtctgtattggttctagtgttattgctaatgaacgcagatcccgtgggacggcaatgatgcctattccaagaacctcactgtccaaatggggcgatgccctgttcggtctgttgctcctcgggctcttgaggtgctcaagaggaaccaacataagcttgggtgagtccatggtatagttatatgactgatatattggtgctgacaaagaacttttagcttcatgacagataagatcatgccgctctcgcaggcagtggagggctataagctatttgaagcgcaccaggtgcagaaagtgatattccaggctgataagtagagaagatgtagacagaaccaggtaatatagaatagaaagaagagtagaatatagaaagatgaagctgaagtcccccaaaaaaaaaaaggcagattttcatactcgggttctctccgcttaaagcaaaacaccaccactccaacttcttcaactctttcacatctccatcttcctcaccttcgtcccttttcttcttcctctcctcttctccttctcctcttctccctttctcccatcgactgcttttcctgttcaccttcttctccccctctcttgatccgagattctgccgctttcccctcccatccatttctccacttcctatctccctcttctgtgagtcctcactctttctagcagttggatcctattcacggactccctcacctgagaatttgcgcatagctacatatggcatgcgcacttctctttgtctcaattaccaaactgactttgccactatttgggtgtgaagtctctaccgtcccgcgaccgtacggtcttcaagaaaccttctatcccgccattcacttgaccttttcaaatcgctcaatcgctcctcctacctccatcgattatcgataaaaatggattccactgagattcaccaaactactgtcgtggacgagcccatgaccgataacttcaacgacaacctcgctgagcagggtgacctagaggcccccctcaagaccgaggaggagtatgctatcgctgagctgactctgcgtgctattgtctcctccaaggaggccggtgttatcatcggcaaggctggtaagaacgttgccgacctccgcgatgagactggtgtcaaagccggtgtgagcaaggtagttcccggtgtccatgaccgtgtcctgaccattactggtcaattgcgctcgcttgctcgcgcctatgcgatcgtggccaagggtcttttggagggtgccccgcagatgggcatgggtggtattgtctctaacaatgggacccaccgtaagtgatatcttttttttattgcccctcaatattttggacttggactggttatgctgttcggggaattaaagcaacccatacagagagtctggaaatccccattttgatctgagcttgttctaactctctccagccgttcgccttctaatctcccacaaccaaatgggtaccatcattggacgacagggcctgaagatcaagcacattcaggatgcatcgggtgttcgtatggtcgcgcaaaaggaaatgcttccccaatccacagagcgcattgtcgaggtccagggtacccccgagggcatcgagaaggctatctgggaaatcggcaaatgtctgcttgacgactggcaacgtggcaccggcactgttctctacaaccccgccgtgcgcgcttccctcagcgcctcgcagccactcaacaacaacccccctgctggaaatggctaccagggcaacaacaacaacagccgccagtacaaccgcaccggcaacggcgccgacttcagcgatggtggctataaccgccgatccaactcggatgctggaaaccgcggctaccccctagttacggaagatggcgaagagatccagacccagaacatcagcattcccgcggacatggttggatgcatcatcggccggggcggaaccaagatcacagagattcgccgaagctctggcgctcggatttcgatcgccaaggctcctcatgacgagaccggcgagcgcatgttcaccatcatgggaagtgctcaggccaatgaaaaggccctataccttctatacgagaacctggaagccgagaagactcgccgcagccagcttccccaggagtaaatcctgcgggatcatctctggtgttttgtgtgcggatgagacggtcctagcaggactcctttgtgttctctgaccttacgacttccttgaagacttgtcggtcacgatcagcggcggtcatgtgctagcgcttcttttatttcttttttattttctatttcattccaattgcttttctctgttgatcttcttcctcggctatcttttgaggttctagcctcgtcacacgtcgctttattcacaaaaaagacaaaagttcactgcgatggatggagggaatacatgcgtattagataccaagtttgtgtggtctttatcgaccattgtgcgttgaattgcatcgcgacccggctgtctctcgatcctatctctcaactttgtcaattacaacagcctcacacctccattccctccctcgcttcccccattcagctgaactgtcaccgcgatgtccctaatctctctttacaccttaccccgactcctgaaccacagacctctccgccactatcccggtccctacctccaccttgtccttctcatcgttccgccttgtacgtcgccaattcgctggcggggtatattgatccttgtctttcctctactcttatctcctcgacttctgtaccctgttctcgttcccttcctatccctgacttactgcaatgctaccaccttttaccaaccctcgaaaacgaaacctctaaataataaaaaaacgctcctcgtctcctaattacccttctttcatgtgcctcctcgctgcgtaccaccttggctcaagtatgaatatatggtgttgaatgtcaataggacattgccattatctgaatctcaagaaatatccagaaagacacctatatcctcctacattgtattatatttagaaagcaatagaattaatcaaaaagctcttgaatatcatttcattccattcaatcgttatgtaaatgttcgttgcgactcaggacaacaaaagaaacaagagaaaagacctgcgggcaacagacttagatacaaaaacgtgcccgcaagaaatgagagacgtgacaaaagaataaacagggaaaagaaaaagaaaaacaaggaacggtaaaccctagcgtgggatacacacatggaacagtgtgccacccggtagagtattatggacaagagacgccgccaatggtaggtttgtacatgaaatggcaagccaccggtagacatgatgatagtccacggtggtgagatggtgtttttgctgtcaggggtatttcccgcagacaaagatcacacagagaaatgtggacatttaatagaatgtgtaatgtgctggcagcgtgatgggaaaatacagaggagattcgtgggaatgcatagcgaaattttgtgaaccgtgcataggagggaaaacttcgaactgccgtggctgctgagacatgcataacaggcaaagtccgttcaaaagatggaatgaatgccgatgtcgaagcatatgtccaaagaaactcgctgcgtaagtgacgtaaccggatattttgacggttggcatgcatgatagtggggttcagccagaggatatcagagatttggacgttaatcgatgctgtcatcgaggtttgcattattgggggtagccggagcacgatttcgaagaccgaatcttcgggcccccaagctgttcgttcgcagtcgtggtgtttggattggtgtgtagctggttgccactttgcttgatggggtcgaaatcctggtctgggagggttccatttggagtgatcgcggactctcttcggctgaagatccctggacgttattggaagagaagctgggcgttaggccgtaacggcgagacccagcctggatgttggagcgggatatcgcaggagtgtacgtagcagggttcatgtagcttcggcggaatgagaaactcgacgagagagtcggtgtccgaggctgggatgactgcacctgcggctgggggaggtgggatggttgttggtattggtgtgatggttggtattgtggggagcgaggggagtatccgaagccgttatgttcctgctgcgcaccggaaatggagcgggacacagtgtgaccttgggagaatcgttgccgaggagggggtatggcttgcgcaggaagcgatgtgcgtatttctgtattgactctggaactcgaacgactatgtgaacttccggtctctccgttctcctcgccaatggtcagcctgcggctgcggagggaacttggcatgcgattgagacgactggctgggctagacatgccgggagattgtgttggactctgcttgatatcgttcgtgtttccagggctggcattgaccacggatgatcgacgtgcttcaaggcgactggacatgcgattcgtactatggcgccgctcaactccttcaggctcttggttcccgtttcgctgatacgttggtatggacatacgagcatcggctcctgcaccattcgataattggggctgcacgactgtctctcggctcgaggacggtcgggcactctttaactgctcatccgtcaaggctaggcagagctcggtcaggctacgacatacactgtccgctttgcggcgggcatgtcgttcgggcgaggagtatcctccattcacaacagagacactgcctgacggagcggtattgacgcctaacgcggtggaaaggttcaaagcatcggttatcgtcgcttcgaggcaggtgtacacttcaccgctcaaaacagcttttgccttggccaatgcggattgcaggatcggatgcgccgggttatgttcaatatctgcagctgagatgctggttttgcggcgttgctttggtgaggaggataaggtggtaatggtagtgtttgcagtccgcggtctctcgttcgtaggggtgtacatcgccgccgaagatgatgcgggcagtttgcctgtcagttccagcttcttgatgcgatctttgagatcatccaattcgtcccagacggtcgatggggccgtgatagacaacgtcgactcgcttccatcagcgcgcgatcgttctgtatcggctcgcggtcgcccgatcacttcggagtttgaagtttgccggctgcttcggattgtagagagccccgaatggcgattgatgcgcggatcattgagagaggaccgacgctccagctcctcggcagcagacggtgtgcgcggtgaagtttctgggctcgtgcggctgaagcggctgcgcggaacaccgacggcggatcgcgcactggatagggtactgtatcggaagcgagcagggtcgtctagaggatgggcggatgacgctagagtatgggtggcgctgtagggagcagtaggggaatcattctggaaatgcaaggggttgtcgagattgctataccgctgatcgggtgagggggtttgttctgtcgttggcgaccgtagactttggctagaataacccagccgtgactattatgttctcgttagccatcgggcagtcgcaagaaggggtcacgcggatagcacaaaagcgattcggaatgcgatcggctcaagacctgtttccttctcacttacccgtctgaaatctgagcgtcctatggagtcgcgccgaccggaatcggttctcgcaatattcagaaacacatcctcgttctttgggcggccctcgtcccccgaggacttgtcctcggccccccgatgagtaccgttgagactgccattgtgagagcgattattctcatttagggttctggtcgctccagaataagccagacttgatggcattgctcttttcacatcagggcgatcttggtgtaattcgtcctgtctgcgcctctttgaagcatagggagattcagaagcttgggggctgggtgagctgaagcttaagacggatcgtcgggcgcggtgcaataaggagcgtttggtggttagatcgggcgtttcatcagtggggccatggaagcgagtgtgcaacgacaaagaacgcgagagaggaaaatgtcggggaggttgggagtgctggtcatggtcatggccagaacgctgattgacctggttgggtcgcaaatggtcacgggaacccgcagtcatcgtgtacctgtacggagtacggagtacaacatacagagtacgatgaagtactgagtaccgtttgaggtgttcctacctcgcctgacaattctggggaaagctgggatggtatagttctgatggattggaaatatgcacaagccctagtcactgcagaatgtcagtaaggacttgaggacttgacctgtcagaaaatattgcgggtatatacttagtagtgtgggaaaatttcaatattgacaagctttttatttctattgattgggtttaaaacttggggtatccttttgacttgtgcatatgaaagttgatagaatttgacgtgaatgacctctatagacggggtatggacgatgctacctatatctatgtaacgatgtagatgctgtagtcgaatggcctacctcaaacccaaacatcaggaagaaggaaccgaacaaccagaacggaaaaaagaacggaaaagaaaaaatcaaaacaaacagggcaggaaccatggttcctctcagtcaggatccatggttactttgaaaccacccaaattgaattcgactgacaggttttaaaacgaaccaggtacgattcgatgtagttcactctatagaccctcgaggatgctagccaatggtctgtctaggccttcattggactatatctacaatataggcatgcccggatgtgctgcttcaattccaagatgcacaaatgtaaagtgggcagcttgggttaggaaaagtacttggcgcaagttgttttgctgttaattaacctgcttaatgctcaattaagtaatgaagtagtgtggcactgcctcaaccgtggaaggctagttagttatagctgcttttcttgagaaactgggctactagttaactacttaaatagagaaaataagcaaggctatgccaataaaggggtttattcagtgatctatatccttgcacggagtatacctgatctcgctactatcatttaatctggaatcctacggaacgcttggtcgaatgagatccatgtagcaatataagccgaatccttcgacgtctgggcactgccactcagcttagcctactatcgcgtgacaaatccattgtcgtgcatattgtggcaaacctcaacgttcaatacagagtagaccaatccggtattttgtttatattaatcattcaaccgaaatctatttgtggaataatccggagaactcgatatattgcaacggctagccgtaaccatatgttgcagtgctatttgcaatctgtaccccgtacctgtgtcagtaataagacaagaccaagagttcactagtagtcgaattgaacaagctgttctctactccgtactctatgcgacaaaccaatgtgtcaagtccgaaacacaaaagcatacgttataaacagctcatgtgcgattcaggacgtttatttttagaagccagtgaaacacgctcccttaggatcactacaccaaaaggggctcatctatctggaactcttctggcccaaaccagatgttttatagaatgatgtatgggaatatcttctccagactcggtatatcgccaaccgaagatccagtttcaggatcgttacgagaacccacgtggaaaaggccgatcattcgtcattcgaaaccaagtgggcctcaagcttcaataactctcctcagcctccatgggaataaacctggatgatgtaatgtagaatgtatattccgtgaaatcaaattccaaccgaattgactctgtttatatatatatatatatatatatatattctacgtacttcatagactatctagagacaagtaactgccaagacctgctagtcacccactagtgtcagtttggcgtgtttcagacagcgccaaaccagatccatggggtttcaggttgtgccttgtcctctcgatctccaccaatcagatccccctcagttcctatttagggactgccaatggtatgcccacaccatccatgggtcagccagcccaccgttcagccagaccgtgtgaatgattgaatgcaggtggacttgatagcgaactcatacgactgagaaactacatatagtcgaaccgataatagtggggtgatcgaggggaatttggaattcaccaaatcaactccctttcgggtcactacgcaccagcacatctccaccatatcccgtctcaatgtctcccccttgtcatctcggtcctgagccgtttggtaccatgtgtaacagatagtgagagcacgggaattgtcaatcttatccaactttaacagaacatactcggacgtatgtgggtattacatgtattttcctggaggttccaaaggccgaaagactattatctcacctgtaacatcatcgataatatacactaaggcaggtgatggcacacctgtagcctctcatcgtcggcggtttgacgcctgaacattccagggcggctaaatatagagcacggcgcagtgattggtgttgctctctccaactctctggatcccctctttttcgtgtattgtatgttacaggtgaaaatcgatctctaaataaaaccacaaagggtccaaaacccgtatactctcatttttctttctttcctttttctctttctacatcgattctgctttctctttcatcctctctccagttccctggaggaacccgcttggattctacattcatcgcctatattgtgatacattcgattacttctttgatctgagtcttggatctttcattccttcatcttccttggaaaatacacatacccttgtgatctggtatgtggatggccttcctatccaacctcttcattatactcgatctcgtgtggatgcctttccccttgtgatttgcatgatcggatcattagtcgcaaaacccttgcatttcagctgccctagattgaagctaaacgcccattcctcccccatagagatcccatttgcgcaggaagcaagtgcatcttcgataccccgaatgccaatctagcctcttctgagagccggattgaaaaaaaaaagaaacttttcctttcatactaccactcggacaatgccagtacaaactagccagtcctttccggacgcatttccttcttttatgtcggtgtttggtggtccccttccgcgatacaaagaagaagcaaacactatccaccctctacaatacccaacccatgtccctgtcaatacacgtctacttccttccccccaccgcgaaagtgtttcatctgtgacctcggcatctacggagtcctccccgaccaccaccatctcgccctttgattcgcccggcgggggtgacgtctctccgagctcgtccccggaatctccgtctgcgatgtccgtcgcatacccaaagttcatgccttcctcacggcccgtggaacttgcgtcgcgccttgcgcctgtttgcgaaccgcgcctgtcgccaccgaactctcataatacgcgccccgactccccaaatcggcgggcgcgcaatctcaagaacctgtcattgcgaatgccacctccatctcaggctcccccacctatcgctacttcgtcggtggtggagaccacggcaaaacaccattttgatgccccgctctctcccatcatcccgatcccttccaataacaagagcgcgaggcgacgcgccgccaatcttaccatccagacccccactttcaataaacccttatccggtatcgccaccgatgccgtgcccccaactccatccctacgtcatgcagaatcctcaccttcgcttgcatcgattacatcgccttcgttcgcaccccggggaggtatgaagcttccccggttaatgtcacatggtgcgcgccggttttctagtgaccctcccgatgatgctacgtcccctgtcaccctgaagccgattgatggatctggcttctcgcatcgagttcttgatggcctggaagaggaggatgaccacctcgactcgcgcgagtcgacccgcaagaaggatcgtggctacccggatgggcctatccggatccacgactctggcgtctacctgtatcttgaaccgacagcagaagaagcggccaaattcgatgtcgtgatcaacgtcgccaaagaagtggcgaacccgttcaatactagcaaggatgagcggagtgatacagtgatgagcgcatggcgaaacacctccatgtcctcgaaacgcttctcctgcagcgagccccagaccgcgatttcagaaatgtccttcaagtctgcctgggaattccagcccttggattccgagacggcaatccctactatttccacccctgcaaattccgtaccggagtacctccatgtcggttgggaccacaactccgaaattcttgaagacctcctcccgctctgtgagctgattgacgaccggatcgcggacggaaagaaagttctcgtgcattgccagctcggcgctagccgctcggcatcgctagtgattgcctacggattgtataaaaaccgacacttggatttcaactcgatgtacgaagcagtcaagggacgcagcaagtgggttggcccgaacatgagtctcatctaccagctcacagacttccgctctaaattgttgcggggatctacctctaagcccccgccccaggaatggttcgtccaaaccggccgacgaagctcagagcctcaggttgcacgagctgagcgctcagcgtccaatgaatcaaggccacccttccgtgggctgtcacagacaccttcagtcagttgcctctcaattccagaaacgagatcgatgcgtcccaatacaagcgacgacggtacctacacaaagttcaaatcctactctcccaagcggagtctgtccccccgacccctcccattccgacagaagttccagtccgtgggacctgcatttggccggcgagggttaccgcgtagcgtcagcagctgtgacccgctcgttcagagccatgtgtttctacgcgatgcgccagactccagcgatgatttgttttcgccgaggacaagcgcattcctctcgccaactcctttagcaccaccatcatttcaccggattgatcgctcaccttccatcccttacgccatagggtttgccaccgaaccggcagaccctcgctcgcctccatctagcggcgagcccctgatcatgagatctattgatgaattcttgtgatctccgcctttgtcctttgatacaggcctgaaacgattccacgacccgacatattttccatgtctctttcctgattgaagaccatctgaccaacccggggtcccgggtcgatgcaacccttctattctcttattaatttcttccactcatctaaatcagatgactggcttgatgatattcatgaccaaagcaggctttgctgtcgctcatcgccatttttcccaacttgcatacttactgcatatttctttttgtcatttggacctacgggtcttttcaacgccattactggtcatcatcgctcgaacttattctttcttttaccactggcgtcttgggtgtccaaaacggacaaatatgataccaaggccaggttctgaaaggttgaaacagacctgtctgcttcctttcggcctggtacctgtaatattatcggagggtcctatctctttggggtttctcttacctcccttggctttcgtctcactttcgcttgattgtctcgtgtcactctcctgtttttccatcttgtcaggcaagggatttgcttctgcacctttagtgtcagcattcgtgctgaagcttcgacccttgaaactcacggtatgctgggattatgggtgaaatatggcgtgataaataccccacttgcacattctcacaatagagatcgacgttaagcttgaattatttctcgtaaagctgtaaacatggaatccagtctagttagtttgtggctggctgttatattagaacggagatagcgataagctccgagaacctctccagagctccatcccaaattttccttgcgcattcctctccacgctcgcgacaatggctgaagaatcccatccggcatacctctcacccagcgagctaggcacaaaagactagtatgtgtccttttcagccacacttccttcctttgctggacgggactccatgaaccccgctctacccctccacgaaagctgtatacatcaattgagccaccaattgatctaaagactgcatctgctatctaaaccaattctcaatcccaaactaacaaccccaacctagctgggaatcctactacgcccgcaccctagcgcacatctcacacgaagctccaaagaacaaccccaatgccaatgccaacccagaccaaaatgacgacgatgccgcatccaccacctccgacctaaacgaagaagacgaccccggcacatcctggttctccgaacacaacgccccgcaaaaagttctccgcttcctcacgcgcaagtccttccccctatcgccgcgcaatacagcgcacaagaaaggcgcccgccagccaagcgttctggatctgggcacggggaatgggagtatgcttgcgctgcttaggaagaggggtgggtatattgggcgtcttgttggcgttgattactcgcgccagagtgttgagcttgcgagggagttgcagcgtgtgagagggcattcggcttatcggagtgactctgaggatgaggatgaatctgaatctgatgatgaagaggaagaagaagcagaggctgaggctgaggaagatactggatctaaggacttgccgggacaagatacatccatccagttcgaggaatgggatatcctcggctcgaaggctgttctttctgagacgggtctcgaggtatcaccctcgtcctcgtctccctcggaggaaacacttccctggtttccatacgatcaaggcggctttgatatcgttctcgataaggggacgttcgatgctgtttcgcttgctgatgatgcgaagactacccgtgtctgtgagaggtaccctgatatcgcgcggcacttagtgcggcgcggtgggttcttgattgttactacctgcaactggactgaggaagagctggtgcactggttcactggtgagcggacgagtggggatcggttggtggtttggggccgtgttgagtatcctcggttccggtttggaggacatgagggccagggggtttgtacggtgtgtttccagaggcttggggacgcttgatatttgagcagacctgcggattaccatgcgaactataccctaagcagaaaaaaggtggagtgcagatagctagtatagcgatatgctgaatatagtactgaaacatttcaatcattcactatagactattgtatactcatctattctgagttcgtagtatcatcatgcaaggggagagatatcgctcaaaatgcacccaagaccatcatcagaaccaaaccaacgactctactcccctctcctcttgagaacagcaataacacaccacctcctctgattctccgtgccctccccttccctaatcggagcccactccctgcgaatctcaccgtcatcctccgaccttgcaatcaaatccctctcatagatcctctcaatcacaaagccattctcaagcgccgtctcaaagaacccggcaacaatcgcccgaccagtatggaacccagaaacgacccacaccttcccaccgggcgaaaggaaccactgcatcgtgcgcacaaggttctcatgctgcgcgcgcatccagtaacaatccgccgccacgattcgcgtaaaggcacctttgttcgccgtcgagaaggagtcatccaacaaaccccattggtgcgggtacactgatactgctttcacgaccgtaggcgagcgtctggccaggttgtactcaacattgaaagcgattgcgccgctgagcgcaggcgaggaggggtggtcggttgccacgaccctcgaggcgttggctagggcacagacgacggatgggagggcggcgcctgtaagtaatatgaatgcgttagtttggtttgggttagggggttgaagaggatgtatagcatcaacggccagtggccacttaccagcgcctagttccagcacactctcccccttgatcctccacaactcccggttctctctctgggcttctgtctcggtctcgcctggtgcggtgggtgtgtctgcttcctccacggccccggccacgaccattgctgcgctccagaggaaatgcgcgaagagcctgcgtccctcgtcgacttggttcacggagctgtctgcctcgggccgttgctggcttgagcttgggtagctggggaccatgatgttgaggtcgccataccgcggggagctgtagaggaggtgttggcctgggtcgccgtggaaggaaggtgcgtcgtctggaaagagatgggggaggaatgtaccgaagagatcttcgggtgattcgtcaaattcgcagtcggcgtcctcgttttggaattctggtgccggggcactggttgtgggtgtgctaggatgatgatggcgggggaggggccgtaaacgggaatgaagcattgttgtggtttgtgagggattttcgatttattgtttagtgaaattgagtggtctggtatgcaccgaggagaaccaagatttgtctggttgaaaaagtcaattgacctattatcagaggccgttgtgatccattccgagggatgcccaatctttaatttcttatctattgttgcgataagggcttgacgaaggtgtttgcattgtttgacggattagcctttcagccctggaggtccgaccacgtcatgccaacactggcgagtattatggagcatacggagtacaccttgtgagggtcacgggttgaaaggttgtctagttaaacccattgagaacaattcccacagctatagtagctcccgatagctctaataattagatcgacaccgacccaacttcctaacccaataatacggacaagaagaatgtcccgagtgtctcagccgcaggttaagaatggcgggccaggcaccttgggaatgtgccagaaacaggaaagatcaaggggcttcctactcctaagggcgccaaaaataatcccaagtgctcgtgcgcaagaaggcgtgacggtcggagtaatgatcctctcctgtaggcgttagcgcgcgagatggcgcgacctgatcgtagcaatgtggtgacctgagcgattacctaactgacacatgtcttccggggcccgggtgcctctagtgccggcttagtgataagccacgattcatctttgccacaaagatatttttaagtcgcacatgtactccatagttacagggcaacgacctagataggtatatgaattaagtgtatcggggtgtcgttaactacgccgtaattagttagcgaggtcgtagttaactaccttagttaatatctatcaggtgatgcgactgactaaggcctcatgacatcattgggcccaccccatccactcttccaagtactagaccggtcgatgctatgcaggtgatcgatacatggcaaaccggtcgtttccaagtcactgcactgcttgcggccatctcctatcaatacacattcgtcattgcccgggcgggaacccagtgacctgattggtacttgaatcaggagtccaactgtgccatcttgtgaccctagttgatcgtcaggcaactggcttttttttttttatatgtgttctttctattcggctatgtggcatacctccatatattaaagtactccgtatataatcttggaatagaattggaatgattttatatccaaagcctagacccatggcactatccttcagaaccagggcgcagacccttcccctgtacggaacgctatccgagcagggcccgatgttcaaagattacatatttcatattacatatttaacaagattatgcccaacatttgccatctcgaattcaccgggttgatactacaacgtacgtactctgaacatgtctttattcggataggtggatccactatgctatcgccatcacaggcattgcgaacacgcacagagacaacacacaatatagggcatatttaggggcatataatagactaataccacattatcgacaataatatagccctcccgtatagatatcttcgaatatattagcaataaaatacccaaactcgtatgtgtgaccggtgatcgctgcccccccgcatgctcaaagggaaaggcccccgcaaacctgagcgattttggctcataccggccctgactctttctctccttctttctcctcttttttttttcccttccacctttctttttttggatcacctcaccttttttctttattcgctctcattctctctcttcatatcatcttattctcgcattcattgctctcctctacctatacatcttcgacccggaattcggccccatttcaccctcacggaattgagggcagctcgtgttcaggaggattgtcaattccattggaagcttcctctcatttcttaccatggcctcgttcaaggtatgtatccagcatttctgccgcacatcttttttttaaagggggggccatactaatgtaccggcttctttttggccctgcacaggaattatccatgtcgcgtcctctccccaataccagccagcggcatcacacgcattccatctcgctcggtgctctcaatccaaaccaccgtgtaactcgccgaaagagcgttaccaccgctgccgccaatgctgccgcagtcgctgcctccatggagggcggggaggctacctcgctccccatgggtgcgcaccgccgcgccctaggaggccgcaagggactggagtccggttccatcggaaacgtatctggcttcagctcctacctctcccgcagcatcaacagctccaagcaggaatcatcggtcgcccgcaaaagttctccgggatcagacaactccgatggcaagcccgatgaccggaaccgccgagccagcgagggtgcccaactcaagaccgaagggaagcgtgcttcgacggccatacgttgcgatcgctgcgggaaagggtataagcatggcagctgcttgtccaagcatatgtgtgtatcccccctaccgctcggccgtcttcttctagctcgatcgggaatatgcaccatgtcggctctgtgcaggtcgccctcgtggttattcaacttcccttcatcactgcccccccttttttttcccatccctttcagcaacatttaattgaccaatttttttttttcgtggtatcttaggtgggaacacgacccagcatggtccgttacttcgaagcttctcatctccaagcatcagcaggttcaactgctggaggccgcctccgttttggtcaccatgaaccacgatgatccacccgatgagtccgccgagttggagtcggaattgtcgtctggatcgccgggcgccctgtcagaaatgcaggatggaatcagttcggctgagaccaccccacccccaatggactcggaggaagatgacgatttcgagatgtcgggtgtgccggcacagtggaccaaacgccccagcatcagcaacgcatccggtttctctcgttcctaccagtccattccgtccagctcgtacaacgagagtgctccgctgcactcgcctaccttctcccacttccgccactcgagcatcgacacccgtccctcaactgcggacacacggttacacgaggatgacgaggcggatcttgccgcggccatcggcctgtgcaatttcggcactcctcgcacggggcctctttccatgacccgcgacgtgccaccagtgcccccattgccggcgcgttacttggactcaagcagccacccgagcaaccagggtctctactcccctcaattgcgccctacagaagaggccgctcgccgagactccgaggccaacatcttcttctcccggtcgctcaacccgtcgctgtcgtacaaggtgtcggatgagcgtgaggtccggactactggtggtgatgaggaccaacaatcccgtcaacgtcgcaacgccgatgtggactttggtaaccgctccgcgccggccgacgatgacgatggcggtgtctttggccacatggaagagtaaatcccccagtactctccgcgccttcgcgtgggtcaaatcggcgtatgccgaacgatgaccccttcacgatctcatgtacgagcttgagcgaattttttgaaccttcttgtttacatgtttccaacctctccggatggagaatagagccgatgtccaataatcggtcagagctcttttctcaacggggtgtttcacaattctcgggaccttttttcaccaccttttgagatcccatgtatcaatcatgtctccttggtccgctttgttttctttatgttttgtcttgccacggcttattctggagacccctttaaacggcatactccgcatggccggcgcagattaccatccccatcaaatatttatatccatagggacgtgacataccactttcatgccctctatgcttctcgtttgtcttttcccctgttctgtttctctcacctcgcacatatataccaaacccacaaattctacgatccgctcccctacttttcccacatgtgcatctcgtccgttcttttctctctccgtctccttgcccatcctcttctatctctcgcctatggtctctgactcttgtgtacccaattgaccctcggacggggcatacaatgaatatatttcatgaacgtatactattctataatgtagatctacctgtcatttccgcatctgtccctgtgcctgtacatcataagcggggaatcaaaagacccactaaagggtacagttccatatttttgtcgaatctattttcgtcataggggaagacgtcgagtgcattcgagaacagaaagaaagaataccccctatagagtagttatttttgatcaaatacacagactaggccgtggggattacgcgagcttcgtggaattagcatgattgcaggtcgtgtgaccccaggatttatcactctctgaagagcagttacctcgctagcttccaatcccctaacactcatttctttagtcaagaccctccgcggccgacatgctcctgcatagcatcgtccttgttgccatttttaacgtgcccccatccgaaaatgttcgattttatcgccgcagtggacgtcgtttctcgacagaatctcgcgccaatatcgccacctacgactatcagattaggtttcctcatacgatgcagctaggattggtatagtcgcaatgcctcagaatttaggcataatgctcatatgagagttcgctttgaaagatagcatcgattctagtgatcagtacagataccctctctaagaacagtctatctattgcatacagatctattggcttggacactttgggaatttacgagagcgcagaacttcttcgacaactcccccatgtgaccgaagatgtggacattcgctcaaatagtaccacttaagcccatgtataggatggtattttctgtcgctagattcgggtgaaccaagtctgctaccgccagatccttgtgagcatcaatcagagatgatgagttacaaacaatcagaagccagtcattgacaggacctttgagtggcttccataagctgccggcaacgacaatgagcgctggaatcatcgaatacaaaaggtgtaggagtatcttacttgatccactggaagctaatctagactagatctgcctctttcccatctggccccgtatctcatctatcgttccttcacggcttgtgtctaggtttaggtttgagagactgcgctgagcgacaacacacatagcggtgcaatcttacctacatgagccactgtggctggctgatcatgctcatttccatctgatattggatatacagggtgcggttctcgtatctagaaaagcttgttagaaaccgaggtaggggagaaattgtacaccgtgacgaaaaacttccacccgactggcacggagatgggcactctctccgtcaaacgaaggtactttgtgacctcttctacccgagaaaatcgctgtactggagaaccgtgttgaatagtaaagccattgcgctcgagctgaaactggtcttcctgtcccctaatttcctcgccaggaataccgtcaattgtctgatgagtcatgttggtctgaaggcagccattgtgggtgggaatttgaatgaatagggccgctgttgccggtacaatctgtccggctttaggaagaacaggctgggatgaactgtcgaaaaaagattcatccatcggcatgatcattctttgcttatttgattcagtcgtagtgtgaatcgagagcaaggaaagcttcaaatctgatgtatcaacaagctcttttgctgaacctgagccattccaggctaccggcagattctctgcttatagcgcgacctgtacgctgtcggttcccgactcgcaggaagtcgatgcaagaatccctgtcccatcatcatcattacgtggctccacaaaagcccctgctttctctacaataacaccgttcattacgggatcactcaaacttttccgcttggtcatatctatcatctactggatgtgggcagggcaggggactcagccatctacgggtgtataacaagcttgagataaacctcttgcttcgtcgcaagttcaagccacatgtgtgtgatagtgattgtatatgcatggatatcaccccaaataagcgcccaggacgccacggctcaaaattcagtttgattgtcgtccaccaaatcagcctagtatacttactacatgctgtgattggttattctactgccactagatgtgcctctcaccctattatgcggatactaacatctcgacacacgtagctgtctataattggccatatcatcaccccaacaaatcaagtgccgaacaaaggatgtgattgatggccaacggcgtttaaaattgcagggtctgattggtgatagtccccacatcattccatctattccggggggaatggtacttttcgagagttttgtttggcccctgaccacgtatttattcgagtgtttctcctcaaaaaaaactcttcgacaagttctgtgaaatcccctattgaacaatcaaggacgacacatatcaaacggtatgtacgtttggcatcaactcatagacaaccctatctctaacatgagtgttgtagatttatcaacatgagctctctccaatgccatcttgacattaccaatgagcctggctcagaagatgagacaggcgaatctgtcacttccgaaggccaggttgagcaggaagccactcatttgcgaccctggaatggcttctggccacgccctcttaccgttctgaagccgggcggcatcatcccgattcagggcaactaaagagagtggttttagagtttaagggatgcgaaacacctctgagcagcggcagtaatctggagattttgtcgttggcgctatcagatcagtcattacagaatgagatgtttatccttgtcaatgatgcatgcattgtattccaatcgaagtgcatcctataaaagccaatgactcttcaatatgatttgcctcgaatttcatgaaaacattctccgacctgtttgacttcacaaggtctgcccaagggaatcaagtcatgagtaagacgaatctggaaagccccatttgccatcgcgggtcagcgtcttccccatgttgcggttgcataaatgtcaaccaacacgagcctctggcgttgttgtatcggaggtacgttggaacgtagtcaaaggccccattcaaatcatcatctggttggaatatattgtcgacatgtagccaggcctgaacttggtctaacagtggcactcaaccgaaaaaacagtggcaagggagggaatagtggctggtgggtcgaactatgctccatgaattagttcaaagccctatgattctatggtatcatagacagacctccaactctggcagtgcgaggaagttgttgtttagttgaaaggtgtgatcctcaaacactgggacaggtgccatggcggaagtgccttactataaagttactagttaatgactgtaatgtcgtctattgcaaataattcttcttgatctgttctaatggaatattccaaggtcaaaggaagtcagttctccgggttacgggctggcccgtatctcccccactacactacgcatgactgggcatccacgtggttggtataagcctttgcttttactaggcccactataactattagcagacctaatcgcctcattttattttttgggggtatcttagaccctaatatcgggctacagccattcacatataagacggttgcgtgcgttaggtgtgtccttgagcaatgagtataagttgttgaaccagttcattaagcagccaaggaattaaccaacacaataagtataagagagcaaaagcaagaaaaggcaacggggtattcacgctcgttctttgatcagcagcctccaccacagcctcctcctcctccacctcctcctcctccgcaaccaccgccgccaccactagatcctccgcagccgccaccggatccgcctgtatagaaaacatattaaaatctactgcaagtcgagattcataaagagactcaccacatcctccaccaccaccgcctcctgcgcagctacctgcggctacggcaccacctttggaaaaatcagtctcagtcaatacttctagaaaggtgacgaagcacttaccacacgtgccagagcaacaattcccagcggcacctacagtaacattcatgcaggcaggattacacgcgtatgaatcacagttgatggacgggtccatcatatatggtccatagtatggcaccataatggggtacccatatgcataaggcatgtagtatggataagcgtcaccctgctgattagaagctttggagccagatcgtttacggcgcttctcagcacgccgggcagccttctcgtagttgctctgtaggcgtaggtgttgcacagatttattccactcgacctgttggtacatgtttgttggccggacggcgttgtgtgaagagatgtgtgggttcttgtttgggtcggacgagatatcggggctatcgtgcaagaggtctgcagcggcttgggcccgagagactgagcgagcagtgatccaccggccatacaggtctggtgttcttgtcgcctcgcagtaccagcaggtacattcgctgtatatctcaccgtcggtgacacggcggtacattttgctagtccaggcaaagccgtccgagagttttccctcgtcgactttgtcgtcgtggtcgatgagcatacgaataccagcatattttccctttgacgtgctgtatttgtagtaccgcgatgggctgagttggtgggtgtgccatgccagatcaacatccagtgtgggcacggccatcttatctgggttgtcaatcataatctggaagaacacctcgtactttttaatcagccggtccatagtgttgaagactgtcggtgagtgcagccagtcgatttggtccattttctccacgaaggtgctttgtctgataacagcgcccacaaggtctagcgcgaagggaccgaggttatcccagtatcgagacatcattcttcggaattggatcttctcgccatacttgatacctttaaggtagacaccatgtgctttccacaaaagatttctgtcgcgaaacttcgactcaaatagctgcctcaagtggataatattcagacaccgatccactcggccatcagtgaatgccatcaagtccgttttggcagcctgtactattcgtgtggggaatagcatgtcccggagtgcccgcggattgggtttgacagatgggcccccctcggggattccataaagattggtgaacgacccgggcatagggagaccttcgtaaatcgttgcttccaggtcttttcgaaactttgccaccttgagccggccatggtcgatcatgtggtcacaaccgacgcatttcgtctcgaatgaataatcggcgaagccattgctaaatttgaaggcattggcaacaagtcccccaaagcgagcttctgtccactggacagcgttcactcgtccgcagcaggggcagtggacttgcgtagtcggcgggtcgtgcagattattccacttgaagttcattttctgctcgaacagctgctgggcttgttcagaaactgtatactccatcgtttggttgttgatgcagctgtttatcgcttcccatggaaatcctgtggcccatgtgctcatcttaccgtatcgaatgcaatcctcaaggaagttccggggattcaacgaatgagcatgccagaccatcaaaatatctgtaaagtaattagtcaatcgtctttttgccttcaaatcaacacattacctatcgggggtagattttccgtgctccatgcaactatcgtatcacaattaaggattctttcatagtcgatacactccaagtcattaatagttgccatcggtcttgaccgggggaggccaatagaccaccacttggtatatcgatcgactgcacgcgctgcatagacagcccagcgcttttcgcgaagacgagcccgcgcttcattcagtgaattcgggaatttttcagcttcagcatcgtggataccaaagatcccgtcatcactagagatggtatctcgcagatctgccagcacagccaagaacttgagatgcgcaacacactggtcgcgagttacggtagttgaagaagatggatgggaactcagatccagctggggcagttctaatggcggctgctgctcgacctggttggccgaataggaaggtggttgttcgctggaagatttgacttcagattgctggggtgcctctttggacactttatccgttgaaacacccatgttggcggttgatagagtaagtatgtcgtgagtgagtgtgttgagtcaagtctgagaggcggggtccggcggccctttatattagtttaatgatgaacacgtatctcattatccgaggacacccagataaagacaagtcggcatggcgctttgatcgaactcatgacctttcaaagcccctgaaacggacgaggtggactagatggacatagttacggacaacatgatggcaattgctactactaattggtctgaagtatcgaaagccttggctaagcctccacgaaatgtgaagatcgtggtaaattaacgagaccatcgtattcgtttatcatccgagccaataatccgagaacgttgtcttcaacttcataacggattggttcacgggcgtaatcgggcgcggttgcactgccttgctgccttggtggcttcgtatggagtagggcccaaggctgagtggagatgcgctgtacaacttacattatacattgtacacaagagtttctagtgtttttctagcgcccttttcatatgcttgtcctacgtacttgtggaattactctgtcctatgaaaagcgatatggataactctgacggctcatatccggtcacgtgctaggaagaccgagcccaggtcacgtggagaaaatgggagaatctccggtcaggtgatatgcccctccgagctgactcatcgatgttcccggaagaagtgcgctcaccgagtgggaacgagaaagttgagacggttttgttggagaaagacaagaaggaaaccggaataaccaaaccaaaaccaaactgcgcgtgtcaagaccaaaactttgtatctgcgaatccgtccgaatctctcccactgtctcaaaccgagatctcgatcagcaaaaacgtcattcagcctggcttctctcgggcgatcaaacggcatcggagagggccaggcccaaactcttgaaccgattacgaccattgataatgcttctattggcaccaatcccgtaatggcgggtgtaaatcagttgcctgtctcagttgccgccgatggcgtgcatggtcgcaaacgcaatatgaccattgcggggatcgacagttctccggggagtatcgaggatatggatgacaatgatgcgcgcgaggagaaaagacgtcagccagtgaagcgcgcctgcaatgaatgtcgacaacaaaaagtaggtctagcgtattaccgcaaaagtcctccagcttgactaaccttttcggattggacagctccgatgcgatgtcattcaagacccatggaccgattgttcacgatgccgtcggctgaggctcgattgtaaaatcgagtctaacttcaaacgtgtcggaaagcgcagccgcaatgcagaaatggagagagaaataatggagctcaggaagcagattgctactggccaaccagtccctggaatgtcacagcaacaagctttgaccgcgggacaattgacacccaagcaagaatcgagtcaagtcagtcccgcagtctaccaaacaccatcagctatgtccgcagatcagtacatgggatctcaagaagctgtagcatccctcctggaccttcgttcgggcttcgatggcaccaacttcgtgaggaacggtggacaaattagacgaattgaggacgttatggttgttcccgagaaagtggcagaactgtttaatatgtgagtccccatctggcaagtctctgtgattgatctaacttcttcccgtcagattcttcacgtactaccaccctttccttccatttttggaccgaaaccagtcacccgatgattatcatagttcctcttcgttacttttctggacaattcttagtgtcggtgcgcgacgctatctaggcgattcgaatttgttgaattcccttgctggtcctgtcagccggctggtctggagcactctagcagatatccctcaaagctatcatgttgtgaaagctctcgctctactatgttcatggccgttccctacaagcagcacctcaacggatccgaccttcatgctgtgtggaatgatggtacaagttgctatgcagcttggtctccacaggccttctcacactcaagacttcagtaaattccgagtggaacttatcgaggatgaattgagagacaaggtgcgaacttgggcgatttgcaatatcgttgctcaaaggtatgtaccaaaacctaatcaattgctgcttgtctttatctcatattttactgtgcagagtttccaccggctatggacagccatcatctactctttatgactggacgttatcctccagcgattcgttagacccgaacttcaagcttcctgacgatataaggccaagattggagatcgaaaagttctgcgacagggtcactcaagcactttacacaaatcgacgcgatcctgttggcttaaccagcgaccacgaacgttcaacaatgattgcctttctatcgcgagactttgaggagttggaagaacagcttaaatcgcagaatgactgtaagcttccgaatttcaagtggggatatattagatgcatgactaacgacatataggtattactgacttgttcctccgtgctgctaacctccatttgcacctttcggcattctttgacgagccgaccactaaaaattaccgcgaacgcgtcttttctctgtatgtcgcgacgacatcattcctcgaagttgtcctaaacctcgagaccgaggttggcccggtcatctcttacaccccgtactatgtctaccagatgatggttgccgccggttgcactcttttaaaactgtgcaagagcttctttgcctctcacatagacatggaatacaccaagaacctattcaaccgtacaatatgggccatccgaggagtgtcagcatccagcaacgaccttcccgaacgacttgctgaagtgttagctcagatgtggagattgggaggagctactcaacggactaacaatagtaccgatgttgacgactccctgcgactcaaagttcgctgccggatgagcatgtccttgctttacgactctgtgtggcgttggcgagaggatgccaggaccaaaggccgaaacattgaaggtcagtactcctttagaatataagatataaatcagaagtcgctaacctttgattctagcctatctgaaaaatccaacaaatcctgactcagcagctgattcttcggccacttcatctgtcgggcctgtacacacatctgcaatggcaccaggaatctctgggaatgatccaagccttgccccggcacccctgctatcccaggctagccttgggatccaacaacccacaggtcaagcaaacggactcccaagcggcttcattgaacctaattacgaagtcttcgatccgttgaactggctgcttgacggcctggtagacttgccttactcatactccacgatggggggagtagaatcccagggcatcgtatagattggcctgctaatattttctcggcgttattgccggttttttttctattttttgcgggcgtggcttgcgttacttgtatcattataccacatatttgatcgctgatacttcccagggagtttgtttatgttgatgttattttcatatccgtctatatttcttatgggtcccttgtacgatgtccttggttcttttccaatatgatgctatgtttggcctcaagtccctgtccagaaaaagccgacagatttagcctcatgcagttataaagtccggtacattatgtacgtatatcacaccgagttatttttgtcgcttctttttacgagcccatattcgctccgtagaagaaatttcatcctagcatggtgatattcttgcttttctttcatcatcctttttgctagacgaaacctatataatctcggtcatcctggcccttcttgtctatttcttctccttcccattgcttcttcagaatacataaaatggctttcctttatgacctcaattggatcgatgtggagcctcgcattttgactatagtactgtgcttacttgtttcctttctctttttctctgtggctgcggccgctttggtgtttacttcctatctaatggctaacgttggtgacctccccccgtctggtgatgattgtccaaagtacaaattcacaagatgctgatatgatttgctgaggcagaatcaagttcctttctctgtacgcaaagactgtttctcgatcttataccaacagtacaagtttgtcgtggacgggcctagtataataaagaaaggctatgaacaattcgcaaatggcttattcgaaatcccgcggacattccgctttggccaagtcatactatgccagccagaattgattgaagaactaagaaataaacggagtactcttgtctccccggagccatggattgatcaggtagggcttccgggtggattctctatgtttaggctaacaaatattatacagctcctccaggtttctcatgttatgcctggctatttccctaaggaaatgggatggccaaaaatcgctaagattacgcctggtttgattcgtgccacggtttataaacacttgcatcggtatatgcccgctatgaatcaggcaattatctcgcagctgcagaccctagagttcaaagacgggggtaagttcaggccactctatagctgagattgtctctaatttcttcaaacagaatgcgaaattggctgctttgatctggcatactcgatcgtagctcgcagtggcagctttgctattgtgggctcgcggctttctcaaaacgaggaatatcttaaagctgtcaaggaccacatccttgggatgatagtgaccactcgtgtacaatttcttgttccagatttcttgaaaccgtgagtgagatacttcattgatttcattttccatggactaagacacgaatagctacattggtgggctcatcgatcgcctcgccactcttgggactagttgggatatgcacgcctcgcgtaagattatgctaaaacacttcgatgcacgtgcagcagaatatcacgccgagatatccggtggcaagggacctagtgagactaatcttgacaaatcgaacactccggtacccctgtcttcccctccccctccatccaatgacaccatgactgaacgatctataggttgaaatcttccagtggctgtatgagagcagtgttcttcgggagcgatggacatatgcagaggtgataggcgaaatgttgctgctgcaatttgcctttatctataccacgtcctatgtaagtgctctgtacgcatgtcataatcctggaatctgctaatttaaacaccaatagggactgtacggcgccctggctgagctagctcgacgacccgaatatatcgcacccctgcgtgaggaaattgatatgtttttctccgcaatgggaccaaccgttccagcctgtgatggcatggttttgatggatagtttcttgaaggagtgtcagcggctgcatcccccttcagcacgtatgtcgcgatcacccttgggtattgtattgtgcgtggctaatgcaatgatatgatattagtctctgcccatcgggtctgtgttagtgacctcaaactttccaacggttcgttcttgaaaacacactaccagcaaggaaacattgagctgatcaagtatggaatacaacaggaatcacactcaagcagggctcccatgtagccgtcccaagcggaatcatccaacgatcgagcgagcactatgcgaaccctgacgcgttcgacggtttccggttcgtcaagcgtgcagcagctggagccaaggactcccggcttgtcgacctgagcccagattatctggtttttggaatgggcgcacatgcctggtaagtcatgtttctggctggccattttattttcatgtcctggtttcaaacccaaccgcccgaatcccatcggctgacttttgctcgtgtttgtagccctggacgatggatggctagcgcgctcatgaagctcgccttcgcacatatcctggatcagtatgacgtactccttcctaattcggcctccctgcccttgactggctcgctgtcattcgaggagttttatgtgcccaactttggagtaaagatagctctgcgccagcgctagtaaggacatcacccgggtgtttgggtgcatgccaaagggagcagctagaatcttaataatgtttcgggaagattaatatttatttcatcatgttggacaatatacagcgcagcgtattctaccacttgaccataacaaaccaagccagtctgacacatcaacaaatacgttggttgccttggcgccttaaagcactatcagataagctgataagatttcgactcttatctccaactgtttcaacttcatctcttcctcgtcatccctcgaaatcatggcttcggcttcctcccagaaacctcgacctctactcatcccacataagcgcacccttttacccctaccaactaaggggcaaggccccaaagtatacaaagtcctcaatcctagcgccatccccgcagaaatgagcatcaaacaatcatacgaagaggccactcaagaaagacgtaaacacacaacttcaagcgcgcataacaaaagtacatttgaagacgaagaagactacgagccccagcccccactctttgaagtctcattctctatgccgccacagcccttcctcgacccaccgacttgggaagcgatgctcaaacacagccgtgagagactagcgacacagtcaacaaaagatgaaccgcgctcagcgtcggatcaggaagacgaatgggtagagcgaatgagacaacgagtggagcgcgagacggagtatgggtcaatggctattcggggccggtcaagtgtacgcgggcgtgggaagaggggaaaggggagaggcgatgtctactggggtggtagacattgattttgatgtgttcgggatgagcttgatgctttttagatacccccatatttggttagtaggccagatacgaccatttgaatagccggctgcctttaaaacacctagaatagttatgtagtatcacgctttcatagtacatcgtgtgtgctcctgtattaatacattacttaatggacacatttacatccgccctggagccaagagattattgcttcataggccatcttatgttacacaacgtgaaagcaaggggcagctcggagcccttattcggtcttgggctgattagactgatgaacaggctagaaattcgatacttacatatgctagaagtaaacaaaacaaattaatggtacatctgagaagtcaacaaaagtcgagacaaaggaggaataaaaacaatggaatcatcatcatgggttggttcatggttcataatcatcatagatctcactcatatcaaatgatcatctcgggacatcgaagcaatttcaaaaaaccaaaaaaaaaagcaaatgcatcgtgaaatcgtcgggcaagtgtgtttgaaatgcgtgaaacatatcgaatcatgaatgtgaggataatatgagacgcaacggagaaaaggacatcataagtcatctcatatccacctcagctgtagcactagatgccacgtagacagggccaccgatactccgtttgaggatttcccttcggacagcacgctttctctcgtctcgtctctgccgtacgcgtcgcagacgattccgcacattacgccatgacatcgtctggagtcgcagtccccagcgagagagagaccggaagggagtcggctttaagggggatcctgttcggaacatgccctgatcaaccaagctaccgttgctagtcaccccattgaacaggcgtttcatttctgggctgcggcgtgctagagcagccgggccgtcgaagatgatgtgccgctggggcaggcctagagagttgtttacaatcaaggattcatgggggcgcggcaaattgttccgcatcggcgggggttctttctctggggacccgggtacgtcatcccaaaatccacggggccgccaaaaaggatactgacgactgtccatttccagtcctgcggttcggttcttggccgatttcatggagaatgaccgcgctatagtattgaaggaatccgaccgagggcgtgcgctccaggtacgacggacggacctccatcgtcgaccgaggcctgtgttttcatcttgagcgtcatgtaacggaagcgcgggaaagggtctggtggatggtggcttgggtggagtgcgagggttctttaaaggcgagtcgacgttgaaggttgctgtttgtgatgggttgtccggcgtgcgagggggttggggatgatcataagaaatcccaagcgcctggaaaggtcgcctctcggaggcttgtacccgagggtcaacaagcagcagtgagttattgttgtgtgcgaacagactgaccgctgtagcctcttgaatttcaatgggtcccggcgaagacgatggaaccgagccttgggtgaaagggaaagatggaggacgcagggttgccatatcatctgagctagcaaagagggagcgcaaattgggagcttcgagtaggccattgcggtcaggcgaagccagaacgttgtgacgaggcgggggcaccggctgatgctcacggcgtttttgcatcttgaggtcaatggctaagttatggcttcgtagactctcggaagtaagggaagtcgcacgagaattattctggctcgttggtgcagaaagcgacgagcttcgggggggtactgcgggacgctccgtgggacaacctttagaatcggtctcgcgatatcgattcgatgttgaatcagagacggtgcgttttttctgccccaagatatccgtgcggcccgttgatgctgtcagaggacgacgagttgatagacgagaacccggtttggaagaaacatgactggtcggacgagacctgagagatgaacttctctccggtatgaccactacgttgatggtttcgatattgggctgtattggactgttgctagtcttgaccgggaacggcatctccgatgttccgcttcgaacatcatcagagatgcgagcagccttgtgaatcaggcggtgctgggattcagggagggacgcataagaggtacgctcagaccttgtgatgggagagctggcagaccgtagagagctcctcttttcggtatgccggagcattcgctgggctcgtttgggggagtcgattatcatggcctcaacggtggatgtcgaggagatgaccgacaaaggacgggcgtctggtccactaaatattgctggaccctccggtgatgacgacccaatattccgacggaactgctccactgaagtactttctttgacttcatgcgcaccatttgcacggtcctgcagacttttttccctcatcaaagaggcatccaggtgcttcaaatccagtgcttctctctcgggtgttgatttatagactgatttagtgaggttgtgattttgtgcagactttcgctttcctgctaacggtgttggcgacccatcgatggggtttgcggcccaatgcccatcaaaagactcgaatctagtgtcgcatccagtttcgccatgttgagaagaagcaggtgacggagatccttttatatttgaagggtgtgaaagatatacatttgaggtgggtggctttgatggttgccgcctttgtttcggtgtctgggccgtggtctgagacatgcggaccggggtgttcatatcttcttcggatgagatattctccaaagccgtttgaaatgaatcggctcgagacgacgaggagaaataattaaactggttcaaggtaggtcgcttattcgagtttgttcgaggaggcgtcacatccggggttggaggcttagaggcacggcgaggggtcaacatttgggatgttggaatatctgacagagaagaattcattttctggggtgttcgttcgtcagccacgagttcttcgtggcctgcacccgggggtgtcaagggaagcgacggcgtcgcagtatgtctcccagtctgatccggggaggccggttggataacttcgatgctgggaacgattacaccccgccgaggcagcatcttgtgagaccttaagagcggccgctcaaacgcttgcaaatcctccgatgaccccatcacttctacgcccggcatctcggaaacagcacaccacggagacctgaagcatccacggtcgcttttgtgaattcgatcgaagggtttagatatccttgggcatcatagtactgggtagaacgtttcgtttagagggtcgcaagggtcgcatcacgcacgagcacttcgcgaccagatgcgacctggtcaaagtcaacggatctactccgtaaagcccagaggctttgctttgtctctgtatgatgcagggggtcgccgatcgtccgaggtacattcgagtccactgcaaaggacagacaacagtccaatacggagaaaggagcatggatattttcacaactgaagactccgatctgtacaatgtgagctgtaagggtggggatggacgatattgacgagtggctggggagtccagtctcaaaccctcttatccccgtgtttcagccaagtatgaggcaataaataatcatccagacaacggggggataagagaataagagaattaaaaagagttcaaaaattctcgcatgaaaagattgaataatctgacgaaggggctaactacagattccaacctgtttcccgctgattagcgcctgtttcctattcaggtaatattgatgccttgcagcctcatctgcctcatttcattaagacttcatcacacccgtgatcacactgcagatcaaactagcttctagatctgatgctaccatggcttggggttgccttcttattaaggtagtttcagtgatagttattataggttcatccttaagtgtgaattagtggctgaactacatcctacaatgtacgatgtatatgctcgacctaatctaggaaatgagatcatgtggaaacttgaaattaaatatgtcaatattccctgggcatactccgtactccgtaggtgtctggggtctcacggctctatcagagcccttacttggcatggttggcccttgatgtagcatacattccagtcctggggagagaggaatgaaatgcacatccttatttcgcgctctcgcaaatgaagaactacggatgtcaagtaaccaagcacatcatatgtatgtttggattctcttttccgatggctctcatttgaggggatatgatcttcatttgaaagtgtacacctagctaatctcgtactgcgaatacatcaaggatgaacacggtagactttcgaaaacttgaaatagaatttatgcctctaccatatgaggaaatttcctattcgagatccattcacgccattgagcgtgggtggtcactgcatgctcatataatgagtggtaaccctagacgatggacctcccaaggtcgggattcctagatagttactaagcacggcattaggccggggccccggcacacggctaaacctaacgctgtacgctgttggacggtttctcttatatgacttgatctacatagccatgtggggccaaatgtaggtaatatgtcaagatattcctaatacggaatatgttgtatatcaatggagcttcatcccatatttatatcctcctcacttccaaggctggtatgctttcgtagataaagtagataaagcattccaggaaagggttccaaggtcgagatccatcttcatactggggctctccggatgattaggagactagaagcatagcggatgttctcagatgggcaccataggttggttaaagcaatataaatctgtgaatttgtgaatctatgaatccagaattctacagatccaataatcccaagcatgtggcaacgggtgatgacgatatcaatatccacacaagccagggttgtaagacttttggaatcaggtcaaaccagcatttgatgtgaaatattaccttgacaaggtagtattgtctaggaatattccaagaaatcgaattgcctatacaggttaggagttaggaggtctggcctctggtctctggtatcaagtctctggggtatatccaaaagaaagaacatcccacagactatgcaatgaagatatcagaataatatactttgaatatagatagattgcccattaccgtggatcagtggcgtaccatgacgtcctgcgaggatggtggacttgtctggtcttggcagatgacatcgcagggaaagatctctcatttcgtcatagttctcccccgccatcatcttctctctctcctttttttcttggtctgtaggtttctggtcttgcttttctctctattcctcttgtttttgtgatttttcaaactccatcagtggagtaaatccatccttcgacttgtttgaaacgcttcccccattgaaaatccctgcttcaatcgccgacacccttctcttcgatctctctgttttcctttcttttccgaaatcaaactaagacatccaagacatctgtttacgaatcgcgattcttcttcgatatcatgagtacaatacagaatatcaagaatttcatccggcatggcaagcaggcccgccttgtcacccctcattccgagccgacgaccgacgtttccactatccatgcagagccacaacgccaaccgataggtcaatattcacctgcactcgaggcttttggccctgaaggcagagccaatgccctccagaaacctgattctcaaatcagacaggatcgctctgtcgaaatcgaacgtctagtggcagaggagaacttgaaccgatcaaagatgcccaaataccctggcctagagcgctggatcttggtagagaagatgggcgacggcgccttcagtaacgtttatcgggccaaggatacgacaacggaatatggcgaggtggccatcaaggtcgtccgcaaatttgaaatgaatagcaatcaggtaggttctaccgcgaggtgccttgctcttcttgttttccttgtggtttttgtgttttccttccttcatcgttacatggtttgcaatctgtctataaacatggccaatacgttatgtagaacgatcctcactatccaacggtcaaaaaaatccccgaggcggcggaggtgcgcatacaattctttttctcacgctcggcttacttcatggcaacttgcgtctgccggcgaaatgatacactaccctatggcattgcctttttacatggttgtgcatcaatctcgtttcgtcattactgactagtcatttttaacagcgggcaaatattctcaaagaggttcagattatgcgcaatctcgaccatcccaacatcgtcaagttgattgatttttccgagtcgcggcaatattactacatcgtcctcgaactttgccccgggggtgaattattccaccagattgtccgattgacgtatttcagcgaaaatcttagccgccacgtcatccgccaggttgcggaagcgattgaatatctacacgagacatcgggtgtcgttcatcggtttgtcatcctgtctgtagcgatttgcgcttgtgaaagctaacattctcatgaagtgacattaaaccggaaaacctcctgttctatccaattcccaacgttcccagcaagaatcccaaacctcaacaaccaggcgacgaagacaaagaagatgagggagaattcgtccctggagttggtgcgggtggtattggtaagattaagcttgcagatttcggtctgtccaaggtgatttgggatagccagacgatgacgccttgcggtaccgtcggatatacagcaccagaaatcgtcaaggacgagcgttactccaaaagtgtggacatgtgggccatgggttgtgtgctctacacacttctctgtggattccctccgttctatgacgagagcatccaagtccttaccgagaaagtggcgcgcggccaatacacttttttgtcaccttggtgggatgatatttccaagtcagcccaagatctgatctcgcatctcctcaccgtggacccggaaaagcggtacaccatcaaggagttccttgcacacccctggatccagggtaccgatgaggagactaccgctgccgcagacgcaccccctctagcaacgccctacctccataccgaaaaaggcccgcagcagctcgactcctccagcgccgaacacgggccctaccagcccgccagtgcccgtttcctcgatcaaccatccgttgcagcagaccggcgcatggacttccgatctccgggcgccttcaacctccgtgaagtctttgatgttggctatgcagtgcacagacaagaagaggaaacaaagcgtcgtgtgattgcgcgccaatccaaccgcagtggtacggcaggattccagtcggcactgggtgctctcaacgaagattatgacgacgaacccgaatacagcaacaacctcggaggccaaccactcgctaaagtggccactcgccaaggtgacatggccggaatggaagccaagctccgatccacgaacctcggcgctcaaagcagcgctgcacaagcacgacaactgccccaccagtcaaagcctaaacagggctacgggatgcatgacgctgctgtcgcgagtgctgcaaagagctctattcgcaagcatcagcagccgttcgagcttactctgagtggttccacattgctagagaagcgtggccgtcgtaatcaaccggtggcttaaacaggatgtatttcttccattggggtcatgatgtgatgtcttcataacgtctttacactttgttgatgagcgatattttcagatatttttatctcttgtgtttttgtttcatggccattttcttctttgttcgttattttctttttctcgagctctttgcgcgttatctgatcggtcccggcgaggaacctgcacgctacatagtcacaattggaaaatgggtgaagtgggttttctttttcgctttctcttgattatccgggagcttgcttggactggaatggagttctggcattttcttctttttctctttgctgtcgttatcataactaagggttacgtccatatttgtcaaggattggataagcatatttttcaacattgcaaggttggaaccttgaaaggtttcacgtatttcatataatcttcctttgagtagcagtctccatctagtcttttcttatagtactgacgtagaaacttattcccggccgctggtctattaagccgaagggcgaggtactataaagctatgtacttgatttcctccgccaaggcttcctatcttagctgtcgcccatttcttgggggcgctcagagtcaggctcactgagtagatttcagtcggggctcagattcagtgagctgctcagtgctcagataaatcatgtgatggaccactcaggcgcaaaatcagggcataaccagttgatcgattaacgagattgaatttggtaatatgataagaggtggtattctgccaagagagaaagaaaaagaaaaaagaaacgaaagaactcaagcggggagatcacgaataattccagcttttttctgcgcaacgtacagatgggcatttccgggcgaggtggcaaagaataaatagtcacgcatggccttccctgagaggcgtacatctcccggactgtctggcttcacaatagcacgctcttcaaaccagggggtaagtggcacaaaggcagaagtgagaatttgcatgtcaataaccattgaatgctggaaagccgggccattggcggttgttacttgcactacgcctcgcatggctccaatgtggagtaccatgttgaactggagtgcctggagatcggaagagaagagggtaagcacgttgcttccagtatcattgcatactaagaaaggccgtgtcaagtttccgatgccaccatatctgggagatatcctgatctgagcatgtagctaggttttgttagttaatgacctcaattaatcgttgacgtaactcggattgatatacctggtgcatatggagggtgttcgaataagcgaatgtttctgaaacagactgggccatttgctgcggctaatattcatagcacatgattagccaaagactcttgacaataccatatagggttggttatatgatatttgcctggaactcatgttgcgacatcatttgctgataatctaatgtctgaatatgttattagtatgagccagtataatatatagccaataggtcgaaggatattcaacaacatacctcgcaccatctgattcctatcttagccgcatcttcccacgagtccttgtcgactcgttgtccatcgataaggtagactgggggatcggatcgttggcgtggtccgagctcgccactttcatacaggcgaatgagggcttcggcattcacacgctgggcttcgccgaaatcagtctgcagacaagctttgagttgctcgacgcgctcttctggctgcagaatgttggggatcgccggacgactgagctgctgatactctaatgtctgaatatgttataagtgtgagccagtatgatatatagccaataggtcgaaggatattcaacaacatacctcgcaccatctgattcctgtcttagccgcatcttcccacgagtccttgtcgactcgttgtccatcgataaggtagactgggggatcggatcgttggcgtggtccgagctcgccactttcatacaggcgaatgagggcttcggcattcacacgctgggcttcgccgaaatcagtctgcagacaagctttgagttgctcgacgcgctcttctggctgcagaatgttggggatcgccggacgactgagctgctgatactctaatgtctgaatatgttataagtgtgagccagtatgatatatagccaataggtcgaaggatattcaacaacatacctcgcaccatctgattcctgtcttagccgcatcttcccacgagtccttcgccgaaatcagtctgcaaacaagctttgagttgctcgacgcgctcttctggctgcagaatgtagggtatcggacacggacatgcaggactgaattggggatgtggatctggcatattggagatggttggtggaaaatgtggaaaatgtgggattgtgtgggttagaggaaagtggtggggctcgcttatcctagtctggttagcgtgtcacatgtctttcattggataataataccttaccgcctacatcaccgccttcacaaaccatcttcaataatagtacgaccaaccattgatctcagactatatggcttttttagtgtatttctttggtatcttatttggtgtattttatacttatctagcttttttagtacttatgtgagcactgagagagcttctcccattcctcatggccgtctttcgcatccccaatttaaacgaggctgaggtcgtggcacaggtcgtggcactagtcatacagaaaggctgaactctcttctgaaaaataccgctcgttcaaggcacagacagaataccagtaagtgagctttaagggatcgctccagatgtccagtgggcgaaagccacttttacccactgagcaaggtaaatccgaaagtggcagaggaagtcaagtacataggtagacaaagaccagtggtggctttttttttataggccaagtacattttatgagttcgtgatttgacctggaatttaagagagaaaaacacaaacttggtatcttgattggtatctatgttcaagttcagaggccacctgggaatggccactggatgatgatatatatgacaagaacactctatccggtccatatattccccccgagtgctttgagcatgtcaatccattggtcgaatcattcagatcgcaatggcaagggaacggattcgtgatatatgggtgcggtgtccgttttcattttgtcgagttctcatcttgcactttccaacacaagcagaaggctgtgtgaaaatcgacaatatgcaagacattttggcaaaccgaagagatttaatccgcttcttaaagggtctgcttaccccgagtctcaatgggtagaagacacatagctacaaaagaagccagaatcaacccgccggacgcatagatgggcgagttggggttcgcactaccggcatatatagcgacaaggggagcacagagaccagtgatacggttcaagcagctggagataccagtgccagtaccgcggttcggagcagggaaggtctcgggggtgtaggcgaacaggacaccgtacataatgttctggaagaaggcctcgagagaactgcataaaagctggatgtctgagttcgtagatacggtaaagcagaacagcaacacaccggtgatcaaggtggagattgccatggtgcccttgcgaccaatgtacttgagctcgaccgtccagcaagccagaagagagccaggaagaccaacgatagaggtgatggcgtaattgcggtaagtgatgtagttcgagttggtctcaccaccggatttggagaggtactgcggcaggaaagcgttgaagagagggtaacccatgccgatggtggcccagcagaaccagagcagaacggtattccagcccatgcgcttgttagcgaacaggggcgcaatgcgctccattgaaaatttggagaagaaacggcccacgatttgagagtaagggagccctgtctctttctcgtgcacctcgacatgaccaccaatttcgttgaggatctcgctggtcaaccaggtcttggtgccgttcttgtgggcaatgccatgaatagcggcgacggcttcttcctggcggccacgggagagcaggaacttgggcgactcgtacaagtggaaacagaagaaacgtaggatgaacatgacaaaagtgatggcacccagagtgagaaccaggtagcgccagcccatgttgttctccttggtgcaaccttcatagctagtgcagctgaagttaggaatgaaagcccatgcaagcagactgccgattagttggccaaaaggccaccagatactcaacatggtcaacatgttgccggagacaaaggggaggaactccaggaaaagagcaccatcgacaggcaggttaccacctacaccaagacccaagcaagcgaacagagcacatgtactgcatttatgatcagcgcaaaattcaaaatgagttattctcatgaagacttacccaatccaagtagggccaccaccggcagccagaccaaaggcaccagccataaatagagtggtgttaaaagcaagacgacgaccaacaatatcagacgcaataccccagaatgaggcaccaatacagagacctaagaataaagcacaagtggtaaaacgcacccacgtatcggagagtccgaattcgtaggagataggggtcagcgtcagggcaactccctacacatggttagatttgatttgtgtgatttgtttgatttcgatctcctacctgaagccaaaggttgtctgctgtccaaccaaaaccacaaaggaagaacagctcccattgataccggcccatgccgatatcctgcagggctctgttgatcacctttgccttgcctgtgtcgtcgagttagatcaaacccccaatttcagggagttttcatacgggaactagtgtgaaaatgtgggatgaacatacggtcataggcagagtcatgggtagccgtggaaatatcagactcgatttctgcacgaagggcttcgagggtcagatgagttggatctttggagccagcagcaccattctccgaggaagacgagcggtccgagctctggctggactccttgtctatcttttccgagagggagtggacaggcgcatcggcgagtggtatgacaacgctgggaaatgtcggactatcctttttgaaagggttaaatttttcgagtcccataatgacggttttatatggcgctttggaatatagttttcagtcgcctgggatttgctgcttcctgtctggtatgtcgcttttcgcttgttctataccgtgaatgtatcgctgggaattcgatgagaggtcgacggtagatctacagatgtgggaaggagttgcaatggggtcatatatcgtaaatccgggggcaattcgctgtgggccgaaagtgtcgcaaggacaatggtcgagatatactgctgtcagggtttgcaaatgggcttgtcgctatcgatgctgggtttgtcgcagtcgcagtcgatgagacagttgtctccagggtagtgcaagcttgctactgaagagcggaagtacctcgtgcgcggcctttgttgaaatggatttcttttctctcgcaaggtgatgatgaatgatataaatgatccgagggcatgaaccagaggttctgccacagggatataagataaaaagctaagagacgaagctctagcaagatatatgaaggaattaaggcaagctgggggtagctataccttgtccaagatgttttgagaggtagcgaggggaaagttgcgaattgacaaaagaggaaagaagggaaaatggcgaggtgggattccagagttgctatatactattagggcaatatgcttccttttttttctttttcttttatattaccattggttctctagtacgagatttcatcactggtcaacgccgaaaagtgggactgccaggaaaaggtgtgatgacattctgatattctgctatggtctgtaatttgaacaaatctgaacatttgcccgcctttggcctcgccgagtgcatataaattagaatgaagacatacttggcagttggacctgatatgtttccaggtttggaaaccgccctaccacctgccgtaactagaatgagctttctataatgtctatctccccttatttttctgtggttgggctttcatagctgtaattaaagcatatcctcgtactctattggtaaattcaacactcatcttttatgagcagtaccagcagaatccaaggtggtcaaaaagaaaattgtacataagaggttccactatggcgtattatattagtaaaattgttgatgttagttaataattcacagctgcacagggaatagctcaaaaggaatactcaaagacctgtagcacggtacttctaatgttcttgcgatctaggattgaacgccaccgaggtaaatccgatatactattcagcctcaagggtcttcaacttctacctttatacatatccggctactctgtatgcaaaattcaaatggtcctatatagtcatcacagatatatttaccaacatatcaaacattagaaaaggtcgaaataatgaacacatttgactctaccctgacccgagacctcattggccttcatgatccaccagaaaaattttgcagtaagacagaccactctatccgtacccgtacctctcactagtactcttgttttgggcgaagtattgagaatacggagatcaagaaccgcatgcgtgctccgcttgaacgtcaccctctacgttgcccttcttacctctctcccaagatattcaagatgttttagttctacagtataataatataacagcaatcctggatccttgcgaataccaaaaataacgttaaaatcttgtacaacatagaataagaaaacaaaaaatggttgaactcaccaacgttgaggatcatgaatcttggcgggcgcatccatgccgcattcagaccagggggaatccttgctctcggccaatcacagcacttgaatactcccgtaacctccaaggctccttcccggataacttactgcttgccattttgggagtgttgtgcatacggcctctagcattacctgctcggaaactgcttatgttcttgacttggagagactctacacggctcaatactgcagagaataggtggctctcggttatgtgtcgaacattcttaacatccggtttttgttccctttcaatacctttcttgcagagtggataagtcaatccgaaaatttggagggtcaggaacgactccactaagaatagcttttacctttaattccttgtgttggatcactacggtccggtttataacatacaacatacaaacaaatcccctgcaccggcccggcgattgtcgtacatggtttgtcccttttaatatgcgaaactggtaaccagctagagtacaccacttggtagcggcttgcgatgtatataccagccaaagggttgtgcgtgatttctctgagttatactgagtaccttgtagggcactgcaagagatttcaggtactcgcaagcttaggcggaatgaaaatactactcctaccaataaagccgattctaggcccgccaagacttccacacatatgttgtaatgaaggcctaatcgggcaagatattcggcattcattacagtcaatcgtatgaggcatcagaaatagccacggcatagggaatgataaactcgatgggatttgatctctagataccctatggtgatacactttgtagcctatttccagactccggtgtcatgcatgagcggttctgccctataaactacatagattcatggcttatattttatatacatattgtcttgatataaaatctgcatatgtgaggattcgtcctttgctaataaaacactagagttcctcggtgcgtctgagcaaccattcaaggtggcgataagccacacgaggctggtactgcggttgcatgtgaccagcctggtaactctgagcccacatcagaccacgctcatagtgctgaacacccatgataccctgagaaccatcgagactagacgcaccgttctccgcaaagacatcggcgtacaagaggtccggaattttgatatcgatgggagtgtgtggcttcttttggaaaccgaggtggccgttccaggtcatattctggatggctaggagcgtaccgttggtgataataaccatgtcaaagtcaccgtttgcaatgagaacgcggttagtagcctcgatgacctgcggcaagacgtgctcgatcgggttcgccgaaatgtcgccttcttgctccgggccggagtcgccaccgacatacacgggctcgagggaacacccgctccaggtctcattgggcgcgtgtagcgctcgcttgacatctgcgcgatcgaagtagacgcttgctccaggcgcttgatagtcgagcgaggtggggaaggcgagaacgtcccagaggagcgggcacatctggttgatctcgtagaggttgaagcatgggttgatgtggaagatttcatcgtagacgaggtcaaacagatcacagtcgtcggccaagctgctggataacatgggcggctggactttgggtggcgggaaagtgaggtacttgtcgatgaactcctcgtatccgcaggatttgtgcttcttttcgagctctgccatgaatgattcgttgaagttaaacaggtttgcgttttgctggacgaagggcacaacgggcacttcttcctgcacggagtcgaactgtccaatgcacgggtcgtatgccagcgcgcctgggtaagtagtcagaatttgcatccaagcctcttgaatattcgcgataactcaccatctaggtcgaaatactccttgtctttttcgtcgagcatcgcagctgagatgtagggcacgtaacgtccagcataactctcaccagtgacatagatcttgaagttcttaattccaaaaatcttctggaagttcttgaagaacttgacaaagtcctctgctgtctcttcttgtgaaacagcagttggtgtgccgacggagtagcctgttccgataggctggtcgaccctgcgagatgttaacagggtttggggttcatatgcatgacaattactcaccacaacacattggttaggttgacccaagcataagggttctctaccggggcaaaagtaccaggttgccatatgaaacgaccagtctcttgcaagaaactctccatcgaactgcatccagggccaccgttgagccagatggtcacttcgtctacgggctcgttgatggtaggctggaaaatgaagaagagcgatctggagctattgttcatatcaattggcaccagaccagaatacatctcgccgatatcaaatgaaacatccggcagggagtcgaccaggtaatctataggtctattagagattttgctgctgacaatgatatagctcgacactcacgcttagtcttcttgctcaagaagcggtaatctttgtccgatttcgcatgtttctggttacgagcctcaactgcccgtttggccttctcttgtggtgcacgagctatctctgcaaagcgaccgtgtttggaggcagccgcaagatccgatcccagcgaaagggccaggagagcagatgacaggactgacttgagtaacatcctggaccggtgggtatgaatgggccagagggcagatgggatgtgtctctttttttgtctcggggagaggacgcagctatatactacccccgaaaggccctaccaatagccccccgaccggtgcactcggtatctgtaggcccatttaatttaataaaaggctaccttgccagaccaagtgcttccaagtggatgattggaagaaatccttagctccaggccggatgcttcttctgcgccacctgggcacgaccccttgttcgtatccactgttatcgcatcccggggtcgaccccaggatggtaggctcacctgtgtatcttgctgctacttcttttgtccctggtctaggtataacgtcggtggttttgtctgcgatattgggcagttataaaaacgctaatcgcatgaatggttgctctaataattcggtcgcattgtgcatagctatcattaggaccggatgagcgacggattccggcgagatcgacgtttatctctcactttgggataacaaactccgtgagcgaaaagcgggggcagctcgcgattggtctggtgtgcttcttgtcccggataagcatcgcgtagcctggaacagttgtattggtctgatagagaaatcttcataattattcatatgttgtacgtactgctcaaaacctcacatatgaacatcatctgacttatctcctttggtggatagattcggcataccggggaagaatactgccaggtgagatccgtatatgagccgaggttcccgcagctcttaggtataatttagatcctaggcatgccaagctttccaccaatagtagctcgaaagcacttgttctaacaggcctcctttcactgaatagcatcagctgatgtgatcaaaatactcgatagacatgttccttttttgagataaataagggtccttctactccgtagtgtttgtttgtttaacgtagtctcaaaagcgaaaacaaaaaaaaaaaaaagaaaaaaaagtggactcgcggggaatcgaaccccggaccactcccatgctaagggagtattataccactaaaccacaagcccagtttgatggaagaggctgccttttaaatactgatgagcctacacaataattcttgcgctagactactcagcagacaagattctatgctagtcaagtaagactaaggttgcatttttaaatattacatgtttcatgcttacacacttctagaatttccagcctggggaggttatatgagattcacatacattaaatggccgatgataaaaacctgatcgtggttatatatatatatctacctgcatcaccatccgattgcgtgcgattccatgtatagtacatcaaccttctactttttctttagaattgtagtaatgtattcaagtataaaccaactaactagtaaagtcatgtctacttacgaatagttaatgttatgcccggatgtagctaagtatatgcgctccgcatgcgtttcgaatgtctcgcggagttcggaagttcggaagttcggagttttaccaccattcatagctatagccgacaaatacattgaatcatcccgtatagattgtcattctatatgatgccaacaaaaagaaccgtcagtaatgtatatcaatcaagctatgttgttcaattgagagcaccgagtgatagttctgaagtcccccatcatttagtcggtgtagaacaacatgtatagacaaataatatccccaaggcgtcgggtatggatctaagcacgatagatccacttccttccctgccaattatcacgtaccccgaaaatttctcttctttaattattacacttaaactccaatgggattgattccgcggaaaattattagcctgggcacttttgcatatgagtcttttggaagtttcgatttctaatatgtactgcccctccttcaaatactttctcctacaatatcatcctggatcctcaacctcagagatctaggacttcattaccccttaatgcaacaaagagaatataatagctgctctctccacatagaatgtctaccaatgtcgggtctgccggcggcaagaccggcgatcatgaattcgatattttgaacaccaaccagagcgccacatcctttgaccagaagactactgctcacatggtcaatgagaagtttgacacggaggctgcaccagagcaagaacccagcctagatgatgtataccggacagcatccaccgtggcaccatctcagagatcagccagaagagaccccattagtcgagcgactacagacgctgaagggaacatctaccccgagggaggactcgaagcctggctggtagtgctgggcagcttcctcggtctctttggatcgttgggcctggtcaacaccattgccacatttcaagcatatatccaaacccatcaactaaaggaatacagctcaggaaccaatggctggattttcggaatgtttgcctttctcactttcttctgtggagtgcaggtcggtcccatctttgatgctcgaggcccacgtattcttgtcttcgtgggttccgtgtttgaaatggccatgatcatcctgctcggcttctgcactgaatactggcactttatgatggtcatcggtgtactgggtggagtgggagcgtccctcattttcacaccggcggtctcggcgattggccactatttctatgagaaacgtggagttgcgactggcgttgctgccactggcggctctgtcggaggcattgttttccctctgattctagaagctctattccccaagattggctgggcctgggccactcgggttgttgcgttgatctgtctggttgtgctatcaattgcaaacctcttgatcaggtctcgactcccgcagaagccattttccaaggagaacgtgcttcctgacttccgcatctttcgagacccgcggttcgtacttactaccgccagcgtcttctttattgagtggggtcttttcgtgccaattagctacatctcatcctacgccctcgaccatggtttctctagcaagttctcataccagataattgccgtcttgaatgccggctcattctttgggcgatggctgccaggattctttgccgattttcttggtcgctttaacactttgatcgcgacggtagcgctctgcgtgctctgtaacgcctgcctgtggcttcccgctggagatagtatgcctctgctgatcgtttacgctgttatttttggattctcaagcggcagcaatatcagcctgacgccagtctgtgtcggccaactctgcaaaaccgaacactatggccggtattacgcaactgcctataccatagtgagcttcgggtgagttttttttttacttgtgatgtcacttgcgtatctataactgacatacgtttgccaccagaactctcaccggaatccctattgcaggtgagatcctggcacgctgtgatgggtcttactggggccttatcacctttaccgtatgctgctatgcggctggtcttgcatgctgtaccgccgtgaaggtcattgaagttggctggcgtcaccctctcgcgatctattaaatgtttggattcggtatccgggaccccgatgctggttgatctaataatctcgacacgatttcatgatttcaaagatgagcatagacagaaaagtcctttcccccttcggcttgcattttatatccggcgtccatgaccgagtgatttgttatacatatgtggttgctagtaatgtctatatttatcaatctgtgattgcaattctatcgttagccaactagtcggatgcaatttataaaatttccgacatgatcggttcggcccttcagctgtactcgaactggtagctagaaataaaataatttgccgccattgaggcaatataaaaaaatataagggttggtaactcagggtcaggttccctgcagggctgaacagggcagaacacgtcgcataagatatccgacaggcaccggagctatgtaaacatctggtcacaatgatgcctttgtaccttaaccaaccatggatttcaccactgggaatgatttccaataggagcagactcagctcttaccatggaaactacaaagccatcgaaagcttaacaaaaaacaagcatcgacatcaccccaggccagtccctgtcgctgctatgacatcaaatggccattaatccatcaccattgagtcttctagcctctcgctacatatacaacgttaatctcgcatctcctcctcaacatccttttgcactcgggactttgctttcctttcaatcgcctcgaactctctggtgagcatttgcttcgttgctcaactcgctatctaagaagtcctgacggccttctacaccagctcatccatcaaaaccacagcacccggaaccaccggcaaacttgcatcggccacatttgctcaatcgtcctgcatatacttgcgctggtccgaatcatgttttcaacaagatgcttggttctgctagcctgctccttgactcttctacggggtgtcgtggctgtcccggcggatgtggcgctagagcagcccggccttgaggatcgtcgtcgagaggagcgtgactttggactgcaggagcgccacggccatcctgagcttgagagctcgctcctttctattctaaccgagaagttagctacgaagaccgccccaggaggaggaggaggaggaggtgctactaccgtccccggtgaaggtggcgctactaccgtccctggtggaggaggtggtaccacggtccctggggaaggtggcggtactaccgttcctggcggaggtacagttcctggcggaggtggcgctactaccgctcctggcggaggtacagtcccgggcggaggtggccccactaccgcccctggtggaggtacagtccctggcggaggcggtgctactaccgtccctggcggaggtggcggtactacagtgcctggcggaggaggtgagaaatctactacattattttctgcaagcactattcttactctccctgatactcaaggcggaacttcacccggtggaggtacgactgctactccaactgggggcactgaaacttctcccactggcggtgctactacgacaaccggacctgctcctggcggcaatgttagtctcccccccacaagcggcagcgtcgggccacccagcggccccgcttcctctcccggcggaaccactcaatacatccatcccctagtggaacccctcacccgtcctctcctgaagtagtaactgaaaccactaacactagccagacttctcccactaccagtgagcagccaagcaccacttctcccacgggtggcggtggtgtatctccttccccatctcccagtgttaccactggaggcggagttccaccggtttgccccactccttctacatctagggaaacgacagtcgtcccagtgacggtcacctgtcccgccgtcgtcgtgagcaccgccaccaccaccgtcaccgtcacatctggtccggccttgtcgggaccaacaggttgtccttgccccactgaaggtcctggtggaggtcctggaccgggtcccggaacaggcactactggaggccctggagcaggtactagcgaagtgtccccaagtggcactgcgacagcttcaacgacgaccactagcgaggtctccccaactcacagcgtgacagccccaacgaccacctctagcgaagtctcctcaagccacagcgtgacagtctcacccactagaaccggtaccctgactcggaccctgacccagacccggacatcgacgccccttgtaccaactactagatcccgtaccacagtcaccaccactacaccaggtaccctcgtgactttgcctacaacatcacatgtagctcccggaacaccaggtgcgtcacgtgttactccacgagaatttatcagtcaagatgttgttcgccgacaattttttagcaacgccacagcaacccccctcttcactaacacgagtactccctcgaatgccacgacgagtgcagtgaacatcacccgtattgcgacggagactgctaccgaacccgcgcccgctttcctgcctcgcttctaccgtggacggatacgtgtttaaattgtttggctgagttgggaagaattgactgagatattggttggttggtcgttggaaaatttagatcggtttggttattgccagtttttgatattttttctatagtttgagaggagtttaatgtatttggtggtaatatgatgttgctggtgttcaatgtatggcctcgggttttgtttcttctaccattgacgcaagtgtctggaaaccactgctagagaatacattgacactttaagacatgaggcttattatacttgtttgtgacaagtcatgatctactctctcgaatctatagaaaatacatgtaacgatcgcttgttttgaatgacgtacagaaggaacaaactacgttatgtgagaaacgaggacgggattctatcattggtttttcttctctaaaatcaaaacacatatagaagcagtagcaatgcaccagaaccgaaaacccttcaaacccttcaaacccctgtcaggtctatagctcacactagatttccgcctccaatagagcctgacctatctgtgacggcgacgactattttgccgctcaaactcttcctcgtcagaaatctcttcgacatccgggtcccactgagcaggttgttgcaaaacggtggggatgcagctgatcagatcatcggcaacgtcctggtcggtctcccggtcgttatgcttgcggagaatcctgattgagataggtatgacaagctcaaggttacggcacagccgctcaaactggggatcacgttctacaactgcacttgagatagatatgtcaatttcgccagcaatctcctcttctaaggtggaaatgacatcgttacgacgatgtggtccatggcgaagatagtagattgcatcgtgcagacatgacaagacgaaaatacgtcgctcgttatatggatcatcggctagtacgcgctcaagatcatggcgaggcatcgtaggcgaacaccagactggtaatggagaagccggttgatgtgtgacttgcaagtgaagtttgttgacgattcctggaagcgaggtgcgacaaatagttggattgcccgatgcagaatccgatgtgtcttcggtatgtttgtataagaacttgagaaggtggtgggaatcgaaattatttatgcatttgcacggagtagagttagcactgattcgatttcatggttaacgtgtttgacaaagacagcaatgacgacaaaacattttatttttattctctcaaagaagaaaaggaatattgaggctttgattaaatttcgggagacaagaaagaaactcttcgcctccgtcatactcacaaagacactatttatatcttattaaaagagaggatacagtccatgacagggaaggagcaagaaaccggcgggctttttcgcagttgcataggagtcaggatactgagagactggaaatagccccaaagcattcgtaacactaatcccataatctccatgcaagtattatgctgcaggtattggttctgacactttcgtcatgtttaaattcgtacgtcaaatggatggactcgataaacaaagagaagagtacaaagagtaaaccaaaaaagaaaaataccggtgaccatatgccatcaaataaagaataaactgccagtgttctcattgcgtctttctgaagaatccatagatgttacttgtccgctaagtccatcagtaaggatttcgacagatttggacatttttcatatcacttctcaatactctccctaatctatgattctttttcctagctaggcaaataaaattttggtatacactgagtgacatatcggcaccttttataaatattgtatctctcgtctgacggaggcccgatgtttcatggcgttcaagattgagccggaatcgttttccgttgcttacatgtaatgtactatgtagttacttctcccaacccagtccctgcgatataacggagtaattaaataaaccacaccctaccagactttcaacaatatcaactactccggaccgctatatatactccgttgactctaattatctcttatcagttgcgccgataaagccgacacgctccacaatgacttgggccaatgacgcaacgacctgcctgattgggattagcggatgtttggcatctccacatgatccaatacgagcccgtcccccgcgtttgcttttcagggagcacatatgagatcgacaatctcgccgaatgatacggggtgttcgagcatatctacaacgtactatgtacatagccgaactaggctgccatgctgtctatatcagatttggctatccgcggttgccggggccacgacggggcgatggtccaagtggagggacaccgtgtaacacctccacagtgcataagtacttgccccggttggagttgcctagaacggctagcgacatcaaaccttggaatggacgccgaggacgagataagcgtgacaatcaattggccccggggatcatcgagctcaggtatatgagcccccgttcctcagccctgcagaatgagtgcatttctacttcgtactcattatttcctcgattgctgacacctttacaataaaccaagatctcgctttcattacttttccctccatcaactcgtggaccatcaccacttcaactctacttagatggcggttgtctttatctctcactgtccccaacggcttcattggcattcttatactatatctctgtgtcaggccattcgcagagctagtagaaaaagtacccggacgtctaaacccgttcgctaagaacaattgtcgctgtccaagaaaacgtagtgacaaaccaagaacaagaacaatgtcaatcgaaatcgtcccgctcgttgagaacgacatacctgatgctgtaaactgtgtgcagaaagcgtttgccgatgatccctattttcgctgggcgtttgatgatccatccaaggtatgagatatcttattttgcgatgtacccaaacgacttcgttgtggctgtgagaaaaacatacaaaaagaaataaaatcatgaaacaaaacgaagtcgatgtcgaaccaagtaataacagggtttgacagttcaacatccaacgaaacgcagcctccctcgctgcccatttccaatatggtatcaactgcgactgccccatttctgtcgcgaagatcactcgcgctgcaaatgaaagcaagagcgatgacgacattcgcataccagttggtactgtggttggtgttgcctggtggtactcaccacaagcgccttccatgccagaaacctggtctgtttgggcacaaggctggcttctttccttccgacagcttatgaacaatatccgcttccttggtcgtggtggtctgaatgtgcaccggtattggatttggaagcaagtgcagcaaactgcacacgatgccatttggcaggacccccgcgggtactacttttgcaatgtcgtctgcgtcgcttcggaggcgcgtggtatgggagtgggaaagatgctcatggataatgtcatggacaaggccgaccgggagaatatgccgtgctatctcgagagctccaaggggtatccgaacgtgggtatttatgaaagaatgggctttgaactagtcaaggagattgaatgtgtggacggaggggatgtttgcaaggtgtgccctcttggctgtaattttccatgtcaaatgactgacgcactaatccagttatattgcatgattcgcaaacccaagtccaaagaataaggctgtgataaattttccgatactgttcattaacacagatacacagggagattgagtgacatggctcgattagtatttgaatcaagcatttcggtgactgtcatctttgattgctttaacaacgtgagcgagatgatggaaataatcgaatatagcttttctaaagcttcgttttcccagagctaatttcttttccaatcggcgtctcttttgtcttgggtttcggtcggggaatgccacaaccggttatgaaggcctctttcactttctactgcatctcagaagactttatctgagaattcattggcgctcaccgtcattttgtattaggaatatggcttgttttgctgctgtaaagacaaagttgagagcgagagaggcacatcaacaaccatctattttcataaatcgatctttccaagccatgggcgagggtgcaatgcctctgtagaaccctcggaccccaactggaaagcagtcgaatatgaatatccacttccgggtctgcctgaattaggcttcaatctctctcaggtcaacgcctattctcagagcatgagtgagcttctacacgtcgttcgatactgtcgacaaacgcctgtgaagtgatagcctaggtgagcgcttatgatgtctctatttttagaatcagttcaactatatacatatggaagacaaccttggaaggagacaggcctcagcccatgtcgcccttatgatcaagcccattttcctagcacccccatcagcaccagcccactgatgaaggaaataccaccggttagaacttttcctaactttgcattcaacatttcacctccctcaatgacccagtcacgcgcccacatatcaacgacaccaacccacaccagaataccagcagacagcgcgtccaatgttcctagtgcaatcaaagtgccccgcgaattaccattgaaggtgtgaagaacaccaagcccaatagccatgccaataggtgtgatcaaggcaaatgctagcgccatggacgctttgttagggaatatagctccggggagggttgcaatacgagcaccgagtgccaacccttcaaagaattgatggaacacaatcaccacaagaagtgtcttgtagaatgagtcaccagcaacgacaagggtgaggccaatcaaaatactgtggaacaggataccagcttccatgacaacgaccgaaaatttactgtcgggtccggtaaggtcgaacgagccgtgattgtgactaagagaagccaacgtggactgttgctgttgcgccgaagagtgttcatgctgtcccttctgctgagtttgctgagactcggacggtatggtttctgcggagatattcttgctgtggcgagcaacaataatccggtggccaatgtattccagcaagaaagcaatgaatatacctgccacgactaccgcggaggttgtggcttcgtactcgagttctcccaaacattcgttggtaaacatgaggttcgcatgtgtgtatagctaaggaaaagcagtcagcaagtgatacgtgtgtcaaagttgaaattgcttacatggatgaaacccgtggcgatgatgatgccagttccgaattgtttgatgacggtcgagattaccccattgatagaggcaaatggaagcttcatcaggagaataggggcaaagacaccaattgaactagtgacaaggacaacgaacaatgtgccaatcctcagagggatatcgtagtctcttgcttggacagtacacgttgaaccagtactagtttcctctgatgcacctgtactcgtgcagtgtctagaatagccaaagtcaataacgcctaaatttggaaggattattacaaacttactcgacgccagcgtggaagtggcagttttgtgaagcttcgcttgaggattcctcctggtcatcttcactgtcttcggtctcggtctcggattccgttccttctgcttgaatcaggacatcgtttccgtctccatccatgcagtatctttgaattttgtagtttagtatattgtcacaaatatgcgtacctgtggacttacgactggcttccgtgagagtgacacccagtgtattgtgctggtactccggttgtaggggtagatgaggccgaaaccagaacttcttggccatctccatcaatgcagtaaatgcttgagccatgagtatgacaaccagttacagatgatgattgtgctgatgttgttgctgtagctgcatatactctggcaatgcccagtgatagaaggaagggccgaaaaatgcgcatgatgaagctagtgctttacccttttgcaaataagaacgttgggattgaggttggaattaggatcgatgcaagaaacctgccacaagtgaggagttttcaatcaatggacactgggagcactccgctctaaaaagccgcataatatatgaaaaagcaccatacataggtgtctcacccccaaggttctcgatgccaagcggaagacctttccaccctttcgccaagagcaggcctgagcttgcgattcgggctttgtccggagaatatcgcccactaaacccttgtactctcaaggtacctcccgcccaagtgtcttggcgaccctccaccgagcctttgtcttggcatcaatctgagattttcagctctgattgctggagagcaagatttttagcgagaaaagcgctcgagtgagctctcaaggtcccctctcagcaggtcgcaccatctgtatattgagaaaaatggagaagacatcccactttctcttctagtgttgccttggattggatcgcaggcatagcgaaaatgcgcccaccaaaagccacacttggcaaatagttgagaaaaaccaaaatggtcgaatacggaagctttggggaacttcgtaaaaatggtataaaagctgctcctatcgtggatagaaacttacttctacaatttcaacttttcaatcaatccacctcgattatacgaaaatgcgcttcttgaatctcgttctctctgcagcagttgctgctgctctccccacccccgagagctccgaaggcaatcaatcccagcccttctctcagaatggacttgcaccttgggatgccggcgctgtgaatgaatttcccatccattcgagctgcaatgcaacccagcgtcgccagattgcgcaaggtcttaacgagactattgctattgccgaacatgctaagaaccatatcttgagatggggaaatgagagtacgatctacaagaagtttttcggtggtcgcccaaccatggaaaccatcggtgcattcgatgtcgtggtcaatggggataggaaagaccttttgttccgatgtgacaacccagatggaaattgcgacattgaaggtattggatcttgctctgtgttagcgatgacttactaaacatttgaactaaataggctatgccggacactggcgaggcgaaaatggcactcatgagacagtcatctgcgacttgagctaccaaacccgtcgttccctctcaactatgtgcggccttggatatacagtctcgcaatctgaaaccaataccttctgggctaccgatctcctgcaccgcctatatcatgttcctgccatcggacagaactgggtagaccatttcgcagacggatatgaagcggtcgttgacatggcgaagacgaatgcgacgctgtcaacccatgattcggagagccttcagtattttgcactagaggtatatgcttacgacattgctgtgccgggagttggctgtgcaggtgtccaacatacgcacgatgaagctgatgaagctgatgctcaaacaacatccgcggctgtgactagtcagtcaactcctactgcaacaaccaccgatgccccttcgacaacctcctcagtacctgcggtgagtcgctctctggttgcattgtggtgatcagaaactgatttgaatagaactgccatacacatgacggaggcgtgctccactgcacttgatatttcttacggtgaaatcactcaggcatcgagacaaagatcaaacattggcgggataatagtcctgacgtgaaggaaattgatgggtgatatatgatatcaggagagaggaaaggggttctatgggcccaaggcatcagcctcagcagatttacggattgtaatgtattatggtctatattattactgagcttatttgctacttactatgcgttgaataaataaacatgtatccaatttctacggtttgtatttggctctcgtggttttgtttattaagcatagtggatctaggggtaagaattttttcgcagtgagttgttgctatcttgacttcacccttgccttgcccctcatatcgtagcagctatcatttttgaggagttgttaggcttggggtaaactacatagtccatctttgataagtaatactggcctattagtgagtgagtggcgaggctgggttgcatactgaggtcgctatagatactaactggcatgatcatgaggtagttatactttgccggtattactctcaacatccgcctgatgtgtaaaaccccatagtaaaataaagtctaaagtctaataagaagcttaattggccgaagtatgacatttctctgtagttacttctccattattgtacatgatgcaggtgagcgattcttgagtatttgagtgccatccaaagatacttcgaggttcgtaggcaagtcaacgtcaatgctgcgagtgagccggcgaatgaatatatattcatgtgatcaatagtctctcaaatctcctatcatatttaaagggatttgggttggacgtacgtgtattttgttctacattctatgtttttataaggaacatcgtcaagatatatatcaataccattacggattagattattttgctccaacctaacatggcctatcatagaaaaacgcccaaggaaagtgatcaaaaaccacttctctatctcattgaacaaatctattgaattagttgtagccgaatataagaatttctagcttcctggtaagctttgatagagggagggctgtagacatctactcaacagtttgcccagaaatttggaaattagattatgttgatttatgactttatgatgctacttagtctactgcaggctgccggtgtgaattgtacaatgtcagccagcttgtaccgcctccaggatgtgacctacaatatcctccaggatgtgacctacaatatatgaaccatgccgggatagagacagcccgattttaaatacgcccctgtcgccctgtagtctgttctaccgagagataccaacaacagcgtttcctcaaatgctagtactagggtggagcccacacccaagtgggaaacagggttacaatgtcaaacagagcctatggagagaggacgtggaacaggggatcgcatgatcgaccgataagaatgccgttcgagcaaagatttaccaatggtagggttcttttgctgcaggggaatataatttacactataaggggcattggaatgcttgtagacacacgagatgccaatctaggggtgaaaaacaaccctcgagccaatgagggcattgtatccctacagaaatgattcagttcccccacagggtgttcctgaatgtacctaggaccctttaaaacaatccagattgctgttgccgtggagttgccccaaaacccgtccaggtgcgcttcaagaggaaaccaccactcatccatttttatctcaaaatatccttttgacgggcacacattcgcccctcgactatttaaataattatattccttattgtgataagtccgagtgatgagactgtcgcggtccgcctggacttggagtgcattccaggttgatacggcattgtttatgtacggcagtgtcccgactgttgccattcccgttgaggcaatcacaacaccagcacccaagaccaaagaactacgcccagtaaaacgatccaagtctaaacgaaaaagcctgaagaggtcactgtccaagatcttttgatctgcgaactcgatatcctcccttcctagccacatttggctgatcgctatgagtttgcacggacttggagtgattggggcccaggtggccgcatcgatcaaaagcaacgacgagaaaatccctgacacgcccaagttcgcgcccccacgatgctccattacatcctcgcctggggctcacagccaggagtttgatccatcgattggtgcaaagccatgttcgcctttctatcctcattcaagtccaacaatctcacatgaacaactcaccttcgaaacaaagaacgccaatcggagaagccatatgagagatatcgaaagcctgggaccgtacgcgagctgccgaacggatagtccccggcgatcgaagttgtgggaggaagagaacaagccattgacatggctgcagaccctgaccaataaacaacgaatggcactgaaggcagtcgtggctgtggtaacagtggggactatgattgcgatagcattgggcatcactgcggcggtgggaggagcaggatggaaagccagtgctaaaaaaacggcggttggtgtatgagtgagttatctcttcgagtctctttcacctattgggttggatccaccgctgacaggacatgcaacttcaaggttcgacgttacttttgatccggggcgacgagcagcccgatcaccattcattgtgattcacttgccgagctctccgacctaaactaattactcttttctttcttgctgcttgaggatgttatggagaattggagtttaggagcatttgaggttatcgcactcgtccaggggcatgtcacattccgacatgaacaaaatcctacgggtaatgaattggacatgtcatgaactggccggaactgctgtatcatatccttagttatttctttttacccccctattcatttgaatacgacctgtgcatgagttgtcatttgtagctcttgaacttgaaaaatgggagcgaaaacgtaagctaggtcggaccgacctcgggactaagcgggatagtgtaaatccgacccgtgaccccactagcgctataaaagactgcaaacttttcggccccttcttccttttcttttcttcttcatcgaaaaaaagcaactgagcctgccacgaccattgtcctgtcttacgacatccccacgacgatgtgttgccttcggtcctacggacttcggtcttacgggactgatcggctcaggagatagatgatcctcgataggaagttcgtttcccctctgtgtcctcttcagtgagggcggtgggatttgaatgtcgaagacgggacacattccttcgcgtcaactctgttccagtagttgagagcgagagtaacgaccaacgcattgattcatgtgatggtttactattcatagaattacataggagaacggaagatatccaatccaaacaatgcataaatgctaccagtctcagagtcacagtgcaatgttcatgtaatgtcgagtgagctagacctaatactcggtattgacttgacatcactaggaatccatgccatatgctatccggtcgcacggtggtttaaccgaacgaaggacatggacaagatcgtccatatttgagtctgtttgggatgagtcgaacatgactatggcatcaattccgaacgacgagtgcaaatttgtcaatcaaaatgtcccggaccaaccaaggggcttgctcgatctctgaatgcccctacccaggtggtgatctcacccctctcaccctgcggaatgcagtatcaccgcatttttaggggattgcatggcagatgtttacgatctgaccacgatcgaggggtattctcttacttgttggtattattttcattccttacgacattctaatggtattaccctcgccttggcctcatgtcaggatgcagttcctgttgatgcaacggcattcccgcctgcttgttgagctggcgatcatgaatgcgacgaaactactaaaggtgtgaaaatttcctgacgatggattactattcattgcttcaaaggagaatattccatcaatcgagccattcttttatcccgctccagtagcactcgtttccagtcactcttttaactcctacgcgcaagagcatacgtctttttccagtaacatcccccaagcaacgcaatcatgaagggctttatcggtggaatccctgtggcattgctggcagttgctgcccaggccaagtttgctgaacgtgtatgtcatcctactctcaatatgccgatcctccagctaacccaatgtatagcacgagcatgacttccatccccaggctggtgggactgctatcggtggaccttcaggcaatgatgatttccgcccccagactggtgctaccgccgtcaatggacattctggccatggtgacttccatccccaggctggcggtaccgcgatcggtgggccttctgggaatgatggcgacgatggctttgtcagcccctactctgccaatatcaagaccgataccaaggtgaaccagtggaacaaggatgaccactccatcaagctgaagcacaccgatgtgtatccccgccctcccgtggcccctgtgccgtttggccacccgggtgtccccagcggaccccaggtccctggaatgggacctttcggcaagggaaagcgtggtgctccaggtggaactgcaatcggcggcccctcaggcaatgatgagggacagagctttgatatgtctgtgactggtattttcaacaccgaggtcgaggatgtcaacaaggatgatcattccatcgatgtcaagaacaagcatgtccaccctgttgccgttgtgcaccctccccctcaattcaatggaccccctcgtggcggctaccgtggtcctgctggtccgccttccgctggcttcaacactcctccaggggccttcgggaagcgcttcgggcctcctcacgcaggtggcaccgccattggcggcccctctggcaacgatggtggacagagtttcagcgctccgacttacattcagaccgacactaacgtcaaggagcacaacgaggacgaccattctatcaagctgaaacatgaggatatctacccacgtcctcatggccatggcttcgttcccttccgtcgctccgagaaccatggacctcctggtcacggcggggctccacctccgggtcacttcgagcctcacgctgagcctcatttcgagcctcacacggagtctcacttcgagcctcactccgagccccactacgagcctcacccggaacctcacttcgagaatcaccctgagccacacttcgagaaccacccggaacctcactatgcgcctcattacagccccagctatgagcctcactatgagccccacaccacagtggagcatgagcttacttcgttgaaaaataacaacaacggcccctcggctggcagtatcgcttttggtcgccgcgggttccctggcggcccgggtggtcctggtggacctcgtggccctggtnnnnnnnnnnnnnnnnnnnnnnnnnnnnnnnnnnnnnnnnnnnnnnnnnnnnnnnnnnnnnnnnnnnnnnnnnnnnnnnnnnnnnnnnnnnnnnnnnnnnnnnnnnnnnnnnnnnnnnnnnnnnnnnnnnnnnnnnnnnnnnnnnnnnnnnnnnnnnnnnnnnnnnnnnnnnnnnnnnnnnnnnnnnnnnnnnnnnnnnnnnnnnnnnnnnnnnnnnnnnnnnnnnnnnnnnnnnnnnnnnnnnnnnnnnnnnnnnnnnnnnnnnnnnnnnnnnnnnnnnnnnnnnnnnnnnnnnnnnnnnnnnnnnnnnnnnnnnnnnnnnnnnnnnnnnnnnnnnnnnnnnnnnnnnnnnnnnnnnnnnnnnnnnnnnnnnnnnnnnnnnnnnnnnnnnnnnnnnnnnnnnnnnnnnnnnnnnnnnnnnnnnnnnnnnnnnnnnnnnnnnnnnnnnnnnnnnnnnnnnnnnnnnnnnnnnnnnnnnnnnnnnnnnnnnnnnnnnnnnnnnnnnnnnnnnnnnnnnnnnnnnnnnnnnnnnnnnnnnnnnnnnnnnnnnnnnnnnnnnnnnnnnnnnnnnnnnnnnnnnnnnnnnnnnnnnnnnnnnnnnnnnnnnnnnnnnnnnnnnnnnnnnnnnnnngacccaccccgagccccacgttgagaaccaccccgagcctcactacgagcctcactacagccccagctacgagcctcactacgagcctcacactacactcgattatgagttgacttccttgaagaacaacaataatggtccttccgctggaagcatcgcttttggtcgtcgcgcgtatgcccctaccccggagaccagcgttggcggtggtaccgcaatcggagggccttctggcaatgacggtggtagcggtttctccactccgactaacattgatcttaccaccggtgtgaacgagcataacgaggacaaccatgccatcaagggtgacttcacccacgtccaccccgatgctcccgctgagtactcccgtgaggatcatgttgatgctcctgagtgcgctgcccaggtgcacgaggttgttcacaccgtcaccaagacccagtacaagactgctgaggcgacgcacatggcctaccagtcggcgcccgttgtggatactgatccgttctccggctacgctcctcaggagtccttcacccccgttccctacgccgactatccccagcactctgccggagctgacccctacgcctctcccgctcctgctccttccaactttgtttccggccacccttcctaccccgtgcccgcgggtgagtccgtggtccgagcgcatgcgcctatggccacccccgttgcaagttctagcgccgactacgaaaactaccctcagcaccctgtaggggctgatccctacgccgcctcagcttccgccccctacaactatgcttcccagcgtccctcgtactcgaagatcgccgtgcatgttcctatggctacccccgcctccaacgccgcaccgtccaatagcatgggcaagatgatccctactggtgcctccgctgagcagaaggcttctccctcgtcctccgcgtcggcttctgtatctcatggaatcatgttccagggtaacgctgctcgcgtttctggaggcattgtctctgccgctgctgctgttatgggtgtccttgccttcattctatagatcgttggccgtcggtttgagctgcttcgtgcattattagtcctcgtcattcgttattacgcgcttcatgtttccttcaaaccttcattttcgtacaacgttactgtaccttatccattggcccagcctttaatgacgaatatttccttcagaaagccacagatttaccacactcaagcattgactcttggtttctttttccgactcgtagcattcgttctgtaactattagcgaagcccacgcccatgttttgactgaccgattgataagaaaccatctatcaactatagcatttcatgcatgatcagtggaacactcaaccccaacgaacatctcatttgcggttcgtgatcccgaacacctatgtacctatgtaggtagactccaatagtgtgggtcaattcgtcttgataacaagctggcatttgggttcgccactccgaatcctcaagctcaatgacaccaaaacccacctgaacttgaattccaggatattgaccctcaatccaacaatttccggtattgcatattaatcaacggcattttcttaatttatttcttgtatttcttctctgtgcttgataccaacgaccaattaatacccatgtgacatcattgcccatcatctctagatgatctccaaccgttgtgacatcagtacgagtggtacaggacctagcctccagaacaaatataaaagggtaccagtatagtctgatctaattgtatcaaaccacgctactgcaacccaaatacttcattcatccctcgatatctcctccactggacatcaaaccgcttcgaatccaacaatcacttatatctccaaaatggctcagcaaaacccccaccaaggcggtagcctctctgaaatggccgcccaaggcacacgcattcccaatgacgccggcatgatgaataccatcccctcggtgccacgcccagaccagcgcgccgagcacttcggcttcgacaacggaggtatcgccgagccctcaacagcgatggccgctgacaacactaccgacctgccacgttcgacccgggatgtaggtcagaccggcgaagtcatcagcggcacaggcaactccatgccggccggcattgaggccaagcatgcctacatgggctccaataaccacgctggccatggtgatactcgcgatctcaaacattccaagtataaccggagtgagtttgagcgctatcaggaggagtagagggtctcgtcaaccattggcgtgacattttcgtttttcaaaatgatggctggcttccttggcctcgtgctatccggtgtatgatgttatgaatggcgtttgtcatatgtaaaacaattcaataccattgaacaaatcccattagactttctgagtagagtgtgctattcaatgattagattcgtagcctgggctggtcgggcccaataaaccctttatagagttcttcgagaacatctcgcttcctcttgcgatcggcttgagctgcttgctcggtttcagtaggttcgccttccggatcttgagacacccatgaccggatcgttccatcgccgtgcgcagagaacatctctatcccttctccagaggcaccattccctcgccaggcaagatcattgatacgcccagcgctcaaagcactcgaccgaccgcggacattctgtgacccagccatgagacccggcacgcggagacgcttaatgaatgtcccctcgcggagctcgaacatgaaaatctcaccacgatcatcctgctcattgaaattcggccacagtagtgtttcatgccctggattcatggtgcctttcggcactattaacggtgctcgttcagctaggtgcgaggaagagctattacggactcgagggccaaaatgaacaagtgtattggcgcctgttgcagagtcccagactcgaattcgggaatcctgtcctgtcgtcactatgtgactgccattagaggtccaccgtacgccggttacaggcccattgtgggcacgggcatgccgggagaaggctggacgactctcgtatgagatcggtgccgatccagttcctggggccaccagtcccactgggtcgtccatgtccagggtagcgatggcagaattgtgacctccgcgacgcacgtcgaatatgatcacccggttgtcaaccgatgcagaggctaagagatgcggccgatgaggtgcccatgctactgataagactgcgccgttgtgtcccggtagaccttgtgtcgatagtccagatcgtaagtctactagccggaccgaccggtcagacgtgcctactgcgacaagcagtgttgacccaggctgagatgagaacgagtgtgaatatggcgtacagtctaggttgaatgtatgtatcggtgtgatagagggcgattgtagcgccgatagctttaatgtaccatcgtgtgccgtcgagaagatcgtcgatgggacgggatcaaacgggtagatcgacagggaggtaatcgcatgtgtatgcgcgtcggcgtgagaggatttgctaacggacgcgcaggattgatggacgtgttcgagttctgagcctcttgattcaaggtcccagagatgaatcgatgggtcggcacctcccgatatcatactgccctcatgttagattgactgacacccgtcagatgctaagcggtggcacacgcactatcggccctcaaactgatcgacagcgagacagttcacaccggatttgtgagcaaatacctccgctgtggcatctagctcttgatctagaggcgccacatcgtcttcggaccggtccgttggcgcagctgctctgcggctggaaaaccgtatgcccggagcgggctcaatgttgtgcactagcctggttgtttgagcaacatggaattcatttggagttacagacccaagggctctgttgagtatataggaattcatgcattcatcagcgctggtgcttttgcatggagaagtcgagagcactcgatggtgctatgcttcaccgggttaaagttgtgccggcgcatttcccgaatttggccgctgaagatcctcgatctttactcctcactatccgctgcacaccactgtttgatttgccaaaccttgattggtcttcctggcaaacctcaagtatgtctgttgctaggtcactcagcttggatgaggacagttctgtcgagcaactcgaagataagcaagaagcaccgggcgataagccttcaaggcatataaaacgccgcgccaacgtctatgatgcggtagctggtatgttttccgatgcttgccgagcgtgttataccaagcagaaaacatatctaattgcaactaggtcgcgtcaacccccgtggtgtcaacgcaccccgtcacattgcttccctataccgcgacacaacctcatcaagcgttcgaagtttgcgtccagaggagcttctctatcgcaatcagaacattccagtggaatcgatcgaggagaaaacctacttcgcgcatgagaatcttccctctgaccaagctctcccgaactctgagctccttgagacgatacatgcatatgcggccgactactacgaatacgctacggcggataacggcaaagatgaccatcaaaccatggacgagacagcactacttgcatttgggatcctgattgaagagatggccaaggaggaactgggtgaaaccggggatctggctctggttgaaggagaagagctgtcggaggaagaggacgataagacgggcctcgagagcgacaccacagctaaatcagcagcacgaaggaaacgatcaaacagtattgtccgtcagagatcaaaaagacgcaaattggctcgttctgattctgttacaaccgatttggacaccgaaattgacgaaagacggtgactggatgacgttgtcagactgcacctatttctccgcggccgaatcctctcggaggcttttgatgcttgcagctgtatcaagctatgcgcgatcttgcatagctacagtaaaacctcttgaaagggaatcggatcaccctatgcactaccatggcacagccacgctgcacatggtatcggcacatatcccatcagcgaggcaaccaaatcagacttcaaagactctgatatgtaagacgatagccttgctgcgcctgcctgtgcgcctcccgctacaccgaatgtctttaatggagctatacacagaatgatagctccgaggagagaacttgcggtggttaaatcggccaatatttagccggctggcaacaatctcgagatccctccctcgtcgaaccaaaataccatcttggttatgccgtgcatcctgcatgagcttcagttcaattatggctgacactggggcgacatctggttgcgagacctcgtttctgtagcaggatcttgtctcacttgacacgtctaacccaagtagggtcttccaggaatggctcttcctagaggttattacgaattttatatagtcctgcgtgaatctagtcttgcgctgactcccaacaaggctatctttagcagcgttagtaatctctatagtcatcattctacaaatgtgttcaagcaaaataaaaatagttgtacagagaaacccttggaatagaaagggtaagcaatgtcaaatgttaagttgagtttccatgtatggtcttccaaccttaggcaggttgtgttgcgtgacaggtaagcctccagttctctcaggtgggctgctgactttgaactcatccatcactgcgcctccaccaatgcttagccatctcatacttgtccaatgagtggacgctggattgataagctttttcgaagttatttgacagtgcgtgaaatatggtacgtggcttttagaatgttccacctggacaaggcccaggaccatttagatgagactactgacgcgccactaggccaaattaaccaaaagcgataaacaggatttgattttgactcatctccgcgccactagaacctgtcacacgctcaaggatttagagaagtcgctaccctcggttgcatccatcaatggtatccaggtcaaggaatacatccaagctttaaccgacgagggtcaactgcgagttgagaagatcggcagtgggaactggtactggagtttcagcagtgacgaaaagcacgcacgcgaccgccagttggcccgggtgactggtgaggtggagaaagtccggaagtcttgcgccgatgcagaagcggctttggccgctgaaactatgcgccgaggggaggagacagatgacgagcacgaaagggaatccctaatggccaaaagaaccgagcttcaggtggtaatcgatcgggtacggactacggaggcccaactctccggacccctcaattcgctcagcagcaagggtgtgaagcaggtccaagaggagttagcggggttccaacagcaggcactgcagtggacagataatatctacatgttagagcagtatttgcgcaaattagtgggcggagatcgacaactcattgaaggtgtcttgcgggaatgttatggagacgagtacgtggacggagagggtcttgctgaactaggataggataaagatttgaggaaaaaagcttaggtttgcttagcacatggcgaccttggggaaattatgtgaaacttgaaaccaattcagtctttagttcttcgtgatcatcatataaatcatcgagaaaaaggagaaataaaactagttgagccactcgggacaccaagagaagcttgaccgtgcgacacgcgaatcgaaagccccgtctagttcgttctccgcctctcggaggcttatcgcgaactcccgaccctctctcctccctcttctctttcttctcttctattgtcacatcttctcttattctccccccctttcgactactataaacccctccgatcgtctatcaaagttggctcctgcgttctcgagtcccacattcctcccgatctcgcgccatctcctgttgcgcctttcaccctctctccccggcccccgacccccccgacccccgttctagactctcgactacagcacagtatcccgcgatactgagccatctgtccctttcaaccctgtcattccccacgaaaaatatccactcctttatcttgcgatctgaccttgcctcctgatacgctgcgagttcttggcgggggtactgtcgaaatcctgcctcgcgcttcgatgtcacaagaaacaatgtggtgcagtggccctctatcataatccccattcctttctttggactcgggaaatctctcgcgcgtggacaaggatacattccgtgggcctttggaaatcagaccgtgtttagtgcattggtcctggacgccagacccttcgaaaggattgatcttccttgtgtcgcttgattggatttcttgacttaggctgagtgcctcctggtctgtttgactattccccgccattccgtactgcagagaataccggcgcgtgtctccgtccgatcggcgccaaatcggtcgcagtttaccatccccaccatccctctcacccctgccacgttttcttgtatagatgcagtaaacattggctgtgtgtcatgtccgccaaccctccaacccaacctacgttgccggccagtcggaatcgcaactctttcctatccaaatttcgctccccgctcggtcaaagaaatcgaggcatcaccgacttctatatcgatccagatgacccatggcgctcttatttccccggtgatgtcatcaaaggtaccgtcgttgtgaccgttgtacgacccgttcgcatcacgcatatagtcgtatgtctccacggctatgtcaaggtgttcaagaatgcgattccggcaggagagacaacacccgacttgggattcttaggaccagggcggggtcgacgaggtgcagaatacatgggcaatgggttagcgaccttgttcgaggatgagcttgttctctgtggcgatggacgcttgaaggagggcatctacaagtttcgtttcgaaatggggcttcctccttatgcgcttcctagcagcatcaacgtgcgtttgctgatgcgacctctcatacttaaatatgctaatcaaatgggcaactgcagtttgaacgtggaactatcggctactcgcttacctctacccttacccgaccgactaccatgaaccctaccctcacatgtagaagacgggtcaatcttttggaaaatatcgacatcgcacccttccctgcacccagggctcgcatagttaccttggaaccggtatcgaggcgctcaaaacagaggggaaaagcaaagtcaacaagttcagacgcaaccgcagggccggatacatcctcggtcgatacccctattagtggcgcggcaccctccgtagataccagaccaccgctgagcccctcaccaagcaatgtcagctcatctagccggcctagcgaaagcagtcagagctttcgaatcgccagcgatcccagttcatccgcaagcacgagtggaaaaaatagcgagggtcgcagtgtgaccccatctgtgtccgataaaaccatcaccgcaaaggctgagcttctgcgcgccggcgtgctccctggcgataccctacccatcacagtcacgatcaaccattgtaaacaagtgcgcagtgcgcatggaattatggtcacattataccgtcaaggtcgcattgatcttcatcctgcaattccaatcggtagtacggcggccgggaaaaagccggtatacgaagactgctatccgcggtcacgaacgggacttggaggacttaccttgggaacaagtcggacaagcagcacttttcgtaaagatttgtcgcagacttttgccccgctgatcgttgatccaagcaccatgactgcagttgtaaagacttccattcgaatacccgaagacgcatttccaactattacacgagtaccaggagccatgatcaattttcggtactacgtggaggttgtaacagacctacgaggcaaaatcacttcaccagatcgcttcatcccgcgtttcaatatggtctccggtgggactacgttttcacctagcggccaggccctcaatccagccgattcgaacggcgttactgccaactgggcgggcaatatcttggacacagatgcaatccgtcgtgagaaaggtgtgatctcggtggcctttgaggtcgtggttgggacgcgtgattcacaacgagggaaagcgacgaaacgtacatcatctacagctggcgactcgaccaagtcacaaacggcgcctcctgcttctgcaattctacttaaccctgttgatggggaggagtggccagagatcagtccaatgcctaattcccatggcgaataccatggcgattaccatagcgactaccatggtgaatacgggacagaggaggggtatttcccagaggagacggattgggcagagtatcctgaagaatacaatgaaaatttccagccaatggaccctatggttgcgcccgcagaagtcgaggagcctgttgacgagaaaacacgggtacgacgtcacgaagaagctctcttacctagtcagccgcctgaggaagatgaggcaggcccatctacagtatcaatggaggtcccgaccgcgccggttttgccagatgatcatcatcttcaagactaccagcatgtgccttcaccagatacaagcggggggccgcatactgttcgctctgcggaatccctgcagactgttgttgcgaacggcgctgggcccagcgagccacgtacttcaggcgatgataaacaagagcttgagcgtcaccgactccagcagcaggcgagtgcaccgcaagacgagcccagtaaccaggaacccagcgccgggcccagtgcgccagtctttgatgaggatgatcagctagtcggtgggacggcgcatgcagacgagtcgttgcctcggtaccagcgatgatgttgttatgtacatttgcatttacgggatattctggaagataccactattcgcatcatttatgaaacggcgctaaaggcgttgaaatctgtatcatacatttatttgtcaaaatcgattctcaaatctcacataaaatgtttcaatcctctactgtcatcaattgtttggacatccagaattctgtctaggatttgtaaaacgcccttatctcccggctacgggcttggcatccgcttagcgatacctggggtgacttcagcctggcccctggtcaatctccttttccctcacaaaaccccgtctgcttttccaattttcacaatggccttcaaaagcggctcgttcgcgactttcatgattgtctgccgtaagtccatcgcatcgcgagtccccggactccaacggcaaagaggccacgagactgtaataaactaactcagtctgcccaaccagcgacctgtttcttcttgggcattatcttctccctcttcccttacgactacccgatcttgtggtccacagtgttgacacctaccgcacactatgactacctcgaagcgcatctccgcttcctgcacgcctcgcccccgctcatcccacgcatcctgcacatcgtaattttcgtcggcctagccggcctcctcacgaagctctacaagccctccgaatcaaacatgctcttcgacggcgcctcgctggttctctacatgtgcggcgtgacagtctacatcgccaacatcgtcaagggtctgcgcctcgcctctgccggccggtacggcgccgagctggctacctccaccgacgagaatgagcagatccttggtcgcgaggactcgctcaaggttctttccgctagcaatactattctggccctcgtcctcgttggcatcctggtcctgcaggctgggcagtggtacgcggagcgcaaggatgcgcaggaagatgaatcgtttgctactagcaagaagactgagaaggagtctggcgaggcgacggctactacttccggtgcgtcgactgcgattgctgggaagtctggtcggcagggaagccagcgtaagaagagcaattaattgatgtctgttcttaattgtttctctttcttccgttcgtctttgccatagggatatggatactaggtgtgaagtggcgcgcctgagtacttgctttgcttggtagctattgttgtctttctagtcgcctacgcagacgggtatttactgtcgcaaagaaaatcattgaagacgtcttttttttttcttaattgccgggggttcaatgtaattcgactttcgtctatgtacatatgatccataaatatagtatggcacgttcacatagcaacaaaataatatatgaaaatgtatgaaaatgtatggatatggcatgatatgcatccgagagtatggacagaacaaaaaagatggacggatgatcatagatgcatgtaatgtggacagatggtatggcaccgcagaaggggaatcattgcgcaggtcgtgaaagatggtgtgtggtatcatatcatgcatgagaaatttaagttcaacggaatgagaatgggctgcgaggcagatccggtgagcgcggactcagtgccttggcgaacaattcttcgccggaatcattgctcggggtgcgcgtgattgaacccatggctgcatccattgctgtaaacccagtgggctcgcttgtctgttgagtctcctggaggaagtcaggcgggaagagtgcaacgggtttcagtgattcggggcccgaaagattaatgtgagagcttggggtaggggtgggattggtgttaggcgttggcatagaatgtaggtggctattagcgatactgctgaacgagctgaaagaggaaactgcaacatcaggcgattgcggggaaagaagcgatgctccgtgagaacctagtcctagtcagtaagcttctgggacatgtaagtcggtgtagaaatacataccacctcctgacagatccttgtcgctggtctgcaacttgagtcccttaagtttgtcactcagattcctgccactgactggtgacaccggtgtggctggatacacggaggatgagttcgcggaatcatggttaccgtcaaccgagtcgacagcacgcgagcctattccaaagttcaactcaatccattccttctcctgaatggccataagcagcgcgattccttcggcgttgttgcgtgattcatcctcaatctccttttcaagaacttgcaggcgcttcttcgcccagatagtatgcaaaacgccctttttgccagctgtgcgtcccgtggcgcccaatgcaggagggaaaatggcggggagaggattaagctggaaggtgtcttggggccttttaggggcaggcacacctgtcggcgagggtttgggttcatacgacagagtgacaatgggaggaatggtagtatagggagggagcaagaagtagcaacggcgtaggctgtcactcggtctttcatcggcgggcatcgtggcagttttgccggcccatgagacatgccacgacccctccatcgcagatcgggtcggatcgtcgtcctcccactcaatcatcaaaattttagtgccatcattagacctgccagcctcgaactcaaatcgagccagcgccattaacgaaaggcccccatccttgaggcctggagaggtttctagctcagcgaattcgctatcaggggtgaacatgggtggtgcttgagccatggcagtggaggctgtcgggcgcgtacttggggaacttgagatccggactagaaaatgcgggtgggctctggcgaaatcacgaggggcgggatgggaaaggaagagtgcgctggacaagatacagacggcggatgggcggagtggggaatgactgggcgggggttgttacgactcggtgatcacgggatcgtaggaagaaagcacctaggcaggtaaactcggtattaattgtcaaaggccttgccgtgtcggggttgctggagtttcatgtattgctgggatgcaaagttggagcagggggtctattggttcctctaattttagaaccgcggcttggcatttatgcaaacatcccagcattgtacaggatggctttgcaacactggattcatctatgtaatgattttcagatgactccagtataatgtttatattattaaggtagtctccaaattctcaacttgttatgatgttgcttggatggtcgtcctccaaaaaccaagttggcaacagactattgtcttttgcttcttcttcttcttcttcttcttcttgtcgaaggaaaagctggaatgccagaaaaaaagagagatgtttggtttgtctttggacaagtctcaatcaaagaagttgccgaagtttaaataaaccgacaactgaacccaaagagattgaaggtataacaattctcttgtatggacttaaactcatgatgtgattgctactgccttataggagcaagaaaaataagcaaaaggacaaacattggcaaggcataaggtgagatctatattgagcggtgatataagttagtatatcataggaagtggataggatggcttagcaacttctttgaccgaggacgacttctaaagatagaaacagaaccgacaacaagtctaaagtacaagcgccaatagtcaaatgtcagatagtgctactgactccaaggtaaacattgagaaagttcatcaaggaatacaatacccacgttttcgtatgaagacaggtccagtatgatacagtatcatacaaataaacaacaagatgaggggatgaggtagcaggccatgaggaacaggcatggatagtgtgaaagccctatgcaaggccgggatcaacaaggttcgtatggggtcgatgggaaaggccatgcagtggcactttgctcaaggcggcaagatatgcgaacagaagcagcatcaagggatattgcgttctaaaattaaccctaagcttgtgatggggagcttcggccttaaaaagagctcaggcggagtgccctgattggcaaggatccaggtatttgcggtcagctgaatcgaagtttggcttcttggtgcgaagtgcatgagggaaataggaaatcggccaaggcttttcgtgattgccgctagatatccttggttgtcggagattcgtatccataaaatgtgtgatcgtcgagagaaacgggcgtctaaggcgacggcgaggttcaaaaatagaagaagtaggcgctactaagagctattattggaagtcggagcatggtctcgatgatgatcagtagagtgcatgaggctctcgtagcttttcattggaagagatatatagttcgtggctaagaaacacggacctggatttacctaggtggagcacaggcagttatggaagccatacagacctgatattaatttgaggaacatatcgttgcttgatctctggttcgaagctttcgagtattgtgagcaactattatagtgtatacacaagatgatcagaatgaaggttgaacgagagcgtggatctgcttgtatatctaatgcgcttgcacctaacatacatcgatattcaagcatactctacacgacgttgggtgctaaaaatatcacatccctgttcatattgagctaaaaaaaaagcaggaaatggaagtggcatcagttctatgaatagaacgcggtggtacagaaatagcacacgggacatcacaccgcataggaatatgcatacccctccttccctcaatgttcctcctgaacatgattggtcttgcatatgatgagccctcgcaagtctaatttgttgtacagcagccacgcaaaatcataagatagggactgtgattatttgcccctctttataatattacgggtgttactcgtggcagggaccgagttcgtaggtaaatggtaatctataccaattttactaggcagtctgtgacttgaactgagtaaatcaagtcctatctggccgactgattagaaacagctcttctttctatttatggataacaatgcttgtacttgcataaaaaagagatcacaccgatttgttgccttggcgcgaagaaaatgtcacctgggtcgaatgttccttgagtgccatgcgagagtcattctcagctaaaaataagccgtcggctcaccacccctgttgaaaagaaatgaccccaacctcatcacatcttctacatacatccgatgtagaccaattagcaaccagccacattagtgcccaagcgctggtggggcaactttgaatccccactgttccattaatttgttgtccaaaataggtatagcgccggcgcttaactgcatttaccacttcagtgcccctccttcattaatatcgctgattggtcagaatgccagggatgtgagcggtatgtcatttttggttctgggtcctgtgtgatgatgcttcgaggaagaaccaatataaacatctaagaggatcaggaaaattaaagatcatattctcgcagagcaaagaaactctatatcttaaaaaacaggagtcatcagtccaatatggaccttcgaatgttgttcgtgtaatttgtagttgttttttcctttcttagcaggtattattggtttgtactactctcccggccacctaggtgttacccatgcctcttttacacgttaaattagagaatgagacattgacggttccatatctcaggggcaaccttaaaacaactaatggattaaagagcaacttgaccccggtcacatttcttcagcgacaacttgaaacacgggaggcactgtatggcccaatcagtggcgttattatcactatcacgccccagtcgtcaacatcacaaatgcatccggtgcttgtgttttccgaatcaaatgggagacctcgtattctgcgtgcttactggacagtttatcaaatgcagagctgtaaactctcgttgactgcatgaatagtgaataaaacgtgtgatcttccgcattagtgtcacgatgtacatttgtgtatgccaatactgccagtacgctgtaatattacttcaagtatgtaattagtattgtaacggattaatcttttgcatgttactcagtattacttgggcatatccgagtagagcgaggagtaataagcaaatcagactaaagcccgatttgatttgactgggccctatcattgtataagattcaatattccctttgtttgaaatgaagccgcatgagctagatctctttcgataacatcgacggacatatgcctgctgtgaatctcggtttacattccaactgtgtagcgtccgatcaatcgagtcaacaaattaagctgtgaaaatccgtatagaatccttcgactaccagatatgttatcggtatactccgtaataatggggccgatggacttgctcagcctcgtccagatcctttgtccaaaaataggaaaccaagcgccactgtagtaagatatgctctatggtgtacatgaaagacgtgcttctcgtgttcacgcaatatcaagacttaggcattggcacccaagaaaagggttggcagtactttcgtatattgaatgaggctcatacagatcgactattgcatgggtgacacgtggtgaaatgcagggtagttgaaatgggagtagcggcacccgagaatatggatagcgccaacacaacgcgcgtgttcaaactgtatctagcaaaattgttgtcgattgttaccggggtcattcgccaaggtctgccatccatgtctctcgtgtggtcaaagcggacgttcgtcgagtatcaccctatcccatcaagaatccagtgctggttaagcagctaaagccggagatttaatacccaattccttgtcccgattggacggtgtctaagtaatgtgacgtgttcaacaattcaagctaatatgacgacacgtcgtaggtagacttgatagactgggggcagagaatgcaattggctcaggaatggtcctgaggtcagtctctacgtagatacgaaggcagagaatggaaagaacctttcagttcagtgagttataatgggaataaattgacgatggtagacagagtaaataatacacaaaataagcttcgactatcaaagcactaaccaggcgcaaagcatcagatgcaattgtcggtgtgaggaagggtcagaaaaaatcgtgttcccaagccaccgcaaaacgtattcttcgaattaccacttgaaaggcaggacgacacggtaccaagaaacataagcaagtaagacaataaagcaccgggcttatagtgtatgatttttgaacaaaagaaaatgcgctctcaacgccgaatccagcccccacgctaaaaccaccgactagcaaaatgcatgaatcaaacagtaaaacccgtaagcccagattgtcagtcgacttccttggcttcgcgacacttgcgccgctttccctttggcggtgcttcaagctgagtgcgcttgtaggtcaccgtgcgcgtgacaacctgcttcacgctgacaggcttcgcactgcggggcgaatcataatagcgtagcgtccagtctgacggcgagaatggcgaccgaagagtcgttgcactccggggtgttgcgctccggggtattgcgctccggggtgagtccgcgttcggcgagaacttcagcgacgactggatacgaagtcggcgaccatggaaattctttctggatggtgccgctgagtttggggtcggtggtggcagagatatagtcggcgatctgaccgaatcgctaaatgtagactcactgattgcgctcgcgggttgagaggtgggcgatgtagcagtggaggggttgtcaccaatgtacttgggaaaaccgagactagcactcatagggccggtgaagacgggtgtgagagccttgaggaaatccgtgtatgctgctggaggtgtgataggagtcgattgatcctcctgcttgatgtagtcggaaacactggatgtagagccattgtgaagttgcgatgggtaaaccgcgctctttggcgtcttgagaggaggaagaatgggtttgacgttcggcatcttgaccaggtcacaaagattttgagaaaccaagttctttcgaaagatgtgtgagagcaaaaaaaggtgggctgaagtaggtagagagagatgtgatggggtaaggccgcgggtgaagtagttgaaatagagcagacaagtcagggaagatgataatagaaatataagaccaaaaaaggacaatgcttgaagtaatagcagagagaccaagaatataagaaagtgctagccagcagcgaaacgaaaaggatgcggagagactgttttatgtatctgagcaaggcagatagatgatcctggtattggggcgatacaggtaatttcacgtttgggactgtaaaataacgaggctgtaatatttggtggtaagttaccaaggcggaacaagggttcgaggccggacgggcagtcccagtgtggcagtgacttactatttgtgtgccgtcttaacgaggtccgaagaggatatcggcaatgtttgccaaagacaaattcaaggttgttttgttctcttgaaaatcgatgcaaagacggcaaccaaaaaaaaaaaattaagacttgaccgtcaaggtcaagaaacaagaaaatattcaggtgaactaaaagattgtgaaggatatctggggatcaaaccagcaccatgctttggtctttataactttctgtcttgctgttcctcggaccttctcctctatacccgctgcagaaatgcaaaatgcaggagcatcgctgacgcgcgccatctgaatcaaaagaccccttatgccatgtatcaggagccgccgcagagggcggttgttgtcctaggtgatgagctgcccttcaagccactgtttatcctgtactacgctctggttcgtccagttttgacgcgcgcagcttgcagctctgctggcggctcgctttaaggggtatctcgggttgagaattgaagacatcctattttgtctccagtatagtgcgctaaccgaaacaaccccttagttttgttgtgttttgagctggacgatcaagcagagaccctagtttgacattgagatttgaactctcggtccaatcattcatgtgttttaccagctctccaaagaaggttcctgtctccacagttcttcagcagctgcacgatattaataacctcgatcacttctatggggtgctatatctattaaaggggcattgtttacatttggcctactaacttgttgccaggggaagctccggacaacgaactcctctcggcggatacgtggtcacgtcttcaaaagatgtgaattgggttggtacatacgatgattctaatatctggcgctgatagtaaaggaattcaagacgttcaagcctcaaactccgtgtctatgtactttctcgccaaggtcttgggttggattgaaaagacgatgttgtgcatctattcatcactcgtccaaaataacagcaaactgtcggttggaacgactgatgaaacgacgtttcctttctttcttgctaattgagcccacgccctataacttttcctcattaccgctgtggcattctcgcaaaagggaaggttggacttcttccttgatttacctatgttggtgaaacaatacgcgctttgcttcgtggataaaccaagagataactttgaaatcaacactgcaatatcattgtgcaggatccgaaacgatcaatattattttagttaattggctttacccttcatgcgtattgtcagtcagtgtagtagttagtgcattttagggtttcaaacatcgatgcgccctctccttcaaatatcaaagtccatactgagtttctacaaattggagaaaaaggtgaacttcgactgatacccacccggcagacaaaatgtctcagctcttgttatgctccgagagaaagctgcatacttagctcctcaggaaatgatcaagagtagttgagcaaatatctgccagctctaacctggaaatttttaacaggctttgcagtttgcagtctagtgtttggtctctaatattccagactaactactacctacatataggtatgtcttctgcgaagtgggtttaccaagctacaatgcactgagacatgcgagaagtaatattgatatgatatattttggattctgaccaaaatttgaaatatatacagacccaaatcaatgccacgtattgcgtccagaataagacgagaaaaaaacaccagcctatacatgataaacagaacataaagcaagattccagacaacaaattcgtttgcacacaaaacaataaagactagtcgcgaagtggggtatcttttaccatctgagccagcacggggatcaacctcgtgaaagatagaatcaaaaacaaaaagaagacatgctcctcaaataagtaggtagttccaattattccgcttcatgatgtccctccagtggacttgttgcttcttgatttcccgtccacccatagtggcgccagcgccagaggtggagttcgagttgtcaagcctggaaatcggactagtaagcgaggagttgtaggggttctctccagacgagatctgagaggagttgtaagggtcgtccgtcacacgccacacctcatgcaggaggcggtacatgcgtccgaagctaccgaggtccccatggtcacccagcgcagtagcgcgatcggcgatcacggatcggaaggggctcgatgatttggaaaacaagccggtcataagcagtggccagacaagagagcgatcgtagccatggggaccggcaggaatgaatcggagcgcgtctattactgcagcgatcaagctctcgtctacttggttggtatcaaagccaggtgcgatgctagaaagatagatttgagctgcgatccggaagatgtgagtcatggtctttgtcagggcttcagggcgaatggctccagttgcaggtgagaatgcgttctccagcgtgggatcggcgggctttgtgtgctcgagttgttccgccagcgctttactatgataagagacagccgagtcaccgatgcgaccttcgctcttaagagagtctaggcaagcaatctcagagatgagatacatgacgcggtcatcgcatcccatcaattcgcataagccagaggatgctccactcaggtgctttgatcgatactgatgagcaaattcgggagtcttgcccaccattgtcgagccaaggatatcaatccaagaagttaagctcatactaaatggggcgactaggtatccgccagagtgcttaactgttgcagaaggaagttcgagtctggccacaagatttgatgcagcttggaaatgatcaaaccacggaatatcagggaggtagtcatccgaagggccaacagcgcagtgaaagaagatcatggcaagggtcgcatccaggatctcgttgtgattaacatcttctcccagagcctcacatagtttagagatggcttcaaaacggtgccgcatgatatcatggtcaatttgctcaccgaccaatccttccgtagtcttaaggtggatggcagcgacactcagacaacagtgaagatagcacttatttgtctccagagcgcggagaattgattgcgcgcgcaagtgtcccttttggtgagtttctagaacggggaaaatctggcgtagcacattttggataaagtgatcgagaagtggccgatcatgatcgctgatagcaatattgctttgtaaaaatgcgcatgtgtgatcaaggctagggttgatacctcgcgtattggcaccatttgaggcctgagcgaaatattcatcttcaaaccattcatcaccagaaaaagttggcattggagcactgatttggggaggtgcaaatgcactgaatgtcgatgtcgaagtatcatgacgcataggcacatcgttgataaatgtctgccgttcggttcgcacatcgacctcataggaaggtacgtaaggtccacgaggagcacttcctagcccaggagtaggcagctgggatgagaaaagatcgtaggactcgttgtgcctggggcgaccatgttcgtgcacaggtgaaattggcgatcccgcagacatatggcgatgacgatttattgggtctagagtgtcctagatgtcagttgaaaatgtacgcgaagtatgaaccgaataagcacataccacagcggataccgtttcgctccagcgtcttggtttccttgatcctgttcttgatgcgctccctgtgggctctccgtttctccgcatttgcccaccagaccgggagtttgtattcgcatcgcacattaagactgacacaggcgctgcaggcagggtgtttctcgtcgcacttcttccgacgtaggcggcatgtgaagcagcctatttgaattagtatagttcataggaatgacttttttagggacagtgcgcaaagataagagcggatcacataccagaccgggatcgcttgtgtaaacgaccatttgctctatctccatgtgtgtgaggtgtgcacggagtcagtgacatatctgccgaagcaagaggcctagtagcagaggcagaggcagaggagttctttgagatcggcatattgaaatattgaaattagatgaccgcagaatgatcgatgacagtaattgtgtaatcaaaagaccagaatcaattgcagataaaaagagtatggcaaagctgaaccagcaggctttgtagtctatcaagatataaagaaaggaaagggaggttgaccgagcaactgtgagaaagatgatgaagatgaggaactaaaaccgtgggatttacgatgctttaaaaccgatgatagcttgtggaaagagaagcgggtgtttctattttagaatccacctgcacagttcatagattgagttggataatttgggggtcatcagcacgagttggggttggatcgtcgccgaatattgctgggctgggaagccaacaggtataagcaaccaatgagagttgcagaaaggatgataaaggttgcactcccgtcttttgagactaaatttgggacaattagctctgttatttttgtgacttgaggtcgcatggtggcgttagcgcatgcacctcgacgtccaagttcctcgagggactggatggagatcgtccggtcggactgcgattccgtgctctctcctccgtaacatgggtggctgcatatagctcattggacctggattgatttcgatcttcgggttggtttttagttcctttccactatgcaatagtcggactccaacccaacagtcagagttggtgttggcattcgaatccttttacacaaccaactgagggatttaacaaatttaatacgttaagcctacgcatagtggatgccgctgtcaaaatcgcttgacctgcaaggaacgaaggcggggtcgagatgtgacgagcaacaacagagccgggataagtttcgttaagttactaaattcagaaatatgtcgcaaaatttcggacaaatttagtacagtctggcccgcggcattcaccataaccaatggttgagatcaatcatctctagaaggctggtagatcacgacttgaactgaaggattatgagtagtgtgacagtataggtggagcaagccaagctttcagttctcgcatcataattggatcaagagactagaattataaaattgcccactgctcgaccggggccattgagagctctgactgggtggctggggtatagcgtcccacgtctggtgctccgtgcagatttgggggatgtgatgtgatagacgtgcatatatagtcccttaattagcaacacttaaccgcccagcttcggcacaatgcaaggtaatttaccccatcctgtagtttattctatcttcatttttggtcaaattaaccttgagcatctacttttcaatagatttactattaataaccttcaacggagatcgagttgagtcctaaaataagacaattaatctaatatcgagcttcaattggtatagcctttacacttcgtcaaaccccgctcaaactgctagaatgcctgtcgcttttcttcccttgtgtacgaccaatttcccattagcaacggcccactgcagatttggctctcgattggccatcgttacttaccagcagagttaataataattgatcaatctattaccgcatccaacccaattttagccattcaaccctcggcctgttggaaaatttcgatctacacatccacacgttcaaagtataaacgcacaatgaggaaattcctcgtgccttctcaacctattgtaaaccaaatcaaaatttccctggtccacttgcggctttattcatcgagaaataacgatatcgagtaggtgatgtagttaacgatctgtactcgtacggagtatatgcttagttatttgctagtactccgaccgaatgttgaccgcgcatcatccatcgttcaaaccctaggtagttgctggtcgcgaaaatatatcaagagaaatgatgcctcgcatcttgatgtcggcttccgttctcctagggtacctagataaggactgcaggtatagccatccttctttgtcattctattctacatattgaggcttcggagatatatctatcagccgtgatggtatatgtgccatgttattctcaattgcgaataatcccttgaaattcggtcttgcaatgttgtttccaagataaagcccaaagccctactccgtacctttagactatcctatgttacacaaccacagaagaaagtaccacatccgacaaattggaaataaacacggtacgggatacctatctgtagctatccggttattttctaggctgccatttcatatttgctgcaactgaagtcttatacagatacttgaattcctaaattctcatattgtatgtggcgcatcgggttagccgtcataattttatactctatggagccgaaagcaatgcgttgagtttatgaaatctttgacggtgggaattaggcgagtctaaaatacataaatgaaacctctcatctcagatcaaaataataaaagttatgatatggagtgtgttttcctagttaaatctggcaatttatggtgttgatctcttccacatgaacaactgcagctaatttatcaatgcgtcgagaaatatgcagcacatggcacatcccaaccccaccctagcttacctacaatacggcggtgaaagaatccaaagactggaaaaattcagaaatcggccagcagcattccattcccattagactgcccgccctcccagggttagtatcctcatagtgtgtttgaagtgcctgtcaacacatcctccagaaagggcacaagtttaacatcattgtatccgtacacagatcattcgattagcccccaaggttcatatcatatcaacgaataataagacgaacgtaagaaaaacatgtgctatccaagccaccaagctactaactagtctataatcaaaaaatgaaaccgggcatatttttaagtattggtaacggagcgccgttggcaacggagaccctggcaacgtggagaaaaaaagacaggggcatcactcgaggaatggggatcgcaattaaatatagtaaccccgagtgaaagttcaccttccaagaaaatggcgtagcgctaactgagggttgatgcgtggtcgtcacgctgcgtcgggttcctataggtgcgaagtgggggaggggttgcctgcataggcgctaactgcacaccagtcacatcttcactccaacgtcgacaacgtgatcactttagagaaatgcgcatccttcaagccaattaatgtttaagcttgggccgccttatttggcaagaattgcagtgatgggttataattgggcgatgctaatgcgaggtgcttgcatctgaagcggaactactgcaggtgaatcacctcgtatcacaatcacatatgcccttaatccctgctcttagccaatcgcctccgctgtctgctaccgaattttagttacgcgctgagtttcaccaacttggtatgacacggaatttttgtcccgttgagcggttcgggttggctagatcctttccccagcgctacgtggtaaatgatttcttagcacaaagggcagacttattacagcccaactgccccgatgtgacgaacttctgttggatctccgctcatattgagtctattttctatctccatactttcatttcatcatattgttagttcactgctgtgcgggaactctaataacaccacattcatttaattatactactatatcttgcaaattaccatactcacgattaacgacatggtaagctggaatcctaggaaaatgatatgatcgctgttaaccattccagaatatgaactcatcactggctgctcggcgaagagtagtacctgctgaggtagacacgacaaatcatgagtggttctatcccaaaaagaccgtcgagaaacagcgccccaactcaggggcaaccttcttcgatgacacggattctgagagtggtgactggcgccaatcgcaccggcagagtatgcaatcggtaagtgtccttatccttgtatcaaaatatgaagtctaatgtagtatgaaccaaccagtacagtaacgggagcaacactaccctttcgagccctgagctacccactccagacctcctgccaagaaacctgcctacctttcgatcaagtaaggaactgattgcgggcccttcaggtcctgatttgttcagaggatccaggggttcgactgtggatgttgaattctatcttgaaccgtcaccttcgctcgatttcaagtcacttacacagcctgagtttgtcaacccgcatcaggctgagttcgtcaaccaataccaggccgagttcgtcaagtaccaggacgagcgccccaaccagtaccagcctgagcgctccaaccagtatcagcctgagttcgtcaaccaataccaggatgagcgccccaaccagtatcagcctgagcgccccaaccagtatcagcctgagcgctccaaccagtatcagcctgagttcgtcaaccagtaccaggatgagcgccccaatcagtaccagcctgagcgctctaataagtaccaggctggtcgctccaacccttatctgttatctcctaagacaccaaaggcttttccacgcaaccccgatgtgtctcatctatcaaagaaggagattaggaactgggatcctagccaggtcgctcactggctatttatcggtggatatcccgatgatatccgtgacacgttcctcaaaaatgatatcaccggcgacattctaatgaccttgacaaaggatgaactcgagtaccaactccgaatccaatctatgggcagacgtgtccagctcatccaatcgattgattatctcctcgagaacatgcagacgagaccgattccagaaacaccgtctcagtttccgtccgaggcggcgtcttctaacgggagaagatcccccgaatcgttcgccccccaggaattggctcctaaaagaacccctacaggccaatcttatacaatgtctatttcgcctgacggtaaaattctctcttcgcatgcctttggacagagtggggatcaaagcaccgcagacgcagagtctgtatcgattgttggaatcgaggaatttcatccgaagccccacaggtgctccaaaggagagaaatgcagcaagttcaagaagctcaaggagaagcgcctgaagaagcttactacagagtatcccggcgcagattttcaggggggtgctatctttgtaggcagccccggaaatcctgaaaccgcgagaaatcttctccggcccacgtccgaggccgagctttcagcgatggcatcctcaaatatctttggtcctcggtccggaccaagactctctgaggcagctctgagcgaagttcaacgcttagatccacaagaaacaatccgaaactttctcaggcaccagcatatcgatgacttccccaagcctggaccccttgggctggacacttacaatcttccgccggcagacgactttgaggacatctccccgctgaatgcccagtcaaattctatggccgcaaatctgcgcagtcttccgaggcttacgataccaacaagcccgctcacggaagatatgacaaccgctgttaccaccaacagatacttcactcctactcatcagaatggctctcctactgctgttcagcaatttggccctttcagtcaggttcatcaagcccaagcaactgagacctaccgccaaggtacaccattctccgaagttgatgtccctatcactgcaatccccagtgatccgatatcccgtgatgtgtctcaatctgttcccccaagtatgcaatatggaaccttgttccctccgtaccgagatgccaatcacctctcacggagcaactcgacccgtcccagtgatgatctccctctccgtgatgccaactattttgcacggagcacttcgacacgtcctcgcgatgctttccctctccggcaggtgaacgagggcaagcctctgaccccgatcgatgttcccgcagacctgatccgaagcccccgcgtgaaccagtatggtaacagcagctcgctagctctggccgatccggaagttacccatgcgggatacatgaaaaagcgcaagaccacacgtctgctcagacacgagtggtccgacgcacacttcacgctccgtggcaccaacctggccatgcacaaggacgagcgtgatgcgcaccgcatttcgagggccctggaaaacattgaggtcgacgaatatgccgtcgcttgctcgtcgctggcgacaagctccaagctgacggctgcgttcaagcgctcgatcttacgtaacggaaacagtaccactgacattcgtgatggtaccgcttttgctttctcgcttattccagctacaaaggagagtgagaaaaaggctctgtttggaaacagcgctgttaaaacccaccacttcgctgtcaagtctcgtgaggagcgcatcgactggatgcgtgagcttatgcttgccagggccctgaagaagggtagagacggcgaggatggcacgtctatggatgggaatatgatttgagtgtttagattagtggtcttgttgcttccagctctttgcatatgtatacgcttacaattcgtttggtgttctttgatttttggtgtgctgcggtcccaccatcgctgaaggaactacctaggtatcattgctctggcgcttttgttggtacatatttatttcctgtgtcacccccttggacaaattcatgaaacgcgtcgccgtgagacggtcagactgataccccttgattagtatagttgcgtttagttacagaagaggtagttaaggaattcaaattgttaatgtgcgaatcttatttttcctttataacatacaatcttccttgattttgtaaacgtacccaactcccagctctccgcggctcactcatatatatcttcttttgcctgaacattgccgctggaggtgtttctcaatatcatttgtaaagaagcagaaggaataacctttatttgagtctactctactagcctacagttgaatatggttcatctctatcttgcaaagttgttagcgtcctccgaggacagtgtagacatatattccgtgcttggtgatgctatatcatcccatcatccgaacgactagatacgcccacccatctccataagcagagcttctcacaacctcttcgatcggagcagacatgggtatcacagcaccgtgtagcacgggctttgcaaggacaggggttctccgactgggaaacagattaggtagcaatgtgtgtaaaacagtcccaaccgtttgaggctggagagtggaaccgctccgcgagctcaacatttgacttgactgcatactgggtgctggtatggaaggaggaagtggcgattgtaccactttaagggagggagactcggcatttagtgggagtggtagaaagatccggatcggaacgttgcgaaaaggttgtgagtgccggggaagaaggatatttgatatgcgctgaaaggaaagaagatcgactatgtttcttcgtgttaggattgtctctatgattaatgcagcagagaaggttctacacagaatgtttgactcacgttcttgaacggcattccaaagtcccgatgagtcttcttttgagagactcatgatgcccttagctgtaccatttcgtaggaaatctgcttccttcacactgtttataaaggcatcgttcatgaccattccatcggcatcaagtcgaacaaggtcatgcggccagttggtaaagtgcactatcagacgccaaggcagcggtggcccgtggtcagtggactcattgtctcttgtggcggtcttggaggccgggtctgctcccgcatagaggtcaaataacagcccgactgggtagtgccacttcagaggcacaccctcaaactcaaaccagccatcatgagactgggagtttggctctatcaaaaaattcgagaagaaagctcgaagcctaggtagcaacgagggaagatatgagatgcgcggatatgagatctaggaactgagatcagcatttgtgcttatcaagtgcttgaagaacagacatacaagatatggatccgtctgatcaaaggttcgactttctgatgaggccagaacaatctgcagtggcaagcgcccgtcccagacggccttctggatagatccgagagacactcggttctccatcctgaggagtgataaggcgctcggttctttcttcaatgtttgctttgctgctggtttgtcaaaacatggttagctcatatagctatttacaacctataaaaacatacttgatcttcacacgccgtatttctgattactacacgcgctgggattcgcatgtcttcaaccgataagactcgcggatttggaaatgccccgctttcgaaatggtcatgatccgggaaacggcgtatccacaaaattccagagatagtcggccactcttgggaaatcaagcgtttgattccaaggagatactggcggttcgtgttgacatagcgtgacttgaagacgcgccaaaggttgatggcacgtctttctgcctcaggcaataatcccaatatctatgcctcaggcttcacaggttttgatttccaaccttccaacattaaagcagcaataacttttggccaatacatatgcaacctaatgatgcgatggaattcaaggcaagcggatcttgcaggatactggtatcctccagattctggatattcaagcgcaactttgtgtatcttcgttgaccatcaaggtccttgatgaactttctagatttatctacatcttcttttgtgcgtctgtacaccaaatatttctgcacgtcaaaaggcttaagatcacgtcggcattaaatgcagtcgtggcgcgttgttcgcatttcttgcccagctctggtgcctcattttattgacatggccccaataaaaactgcccatccataatctacaggcacgacagcagcggaatacaattgaatcgcctcgccaagtgtttttccgtccgccgtgctttgcagccgctttatattcttggtctcacctaaattcgaaagcttcttggcatgatgttcctaccgatggagcagtgagttctagccatggaagcatactccgtaactgctaacaagcgatcaagagaccaatactaggagcagacccaggctgcgcacgttttagtgacatcgatctacaagtattggtgcaagccgtgccaagattgcgttgaaaggaaaatcgtaaagccgagaagtcttagaactgccgccacggatggccgaagactatcccgaggtgccactcatgtagcttccataccacctcgagactcggcctcgcagccgacaggaggaaactccgccactttcctctggaagctgctcccaacagggcatgcaatatgaaaggattcgagtgtagggctgctagaaactccaaggctggggctttttttgcgctgttgtaaggggcctccaatttctgcaagatcggccaaatttagccttgtccccgcaatctatgatacacaatacgtattcatcccccacgccgcgtattcgcctgtaggttctatggcgaagactgcatttgtggatattttggctcaagaaagacgggtactcgcaagcgcagagaaaatcctattggatattcaccaaagtcaccgagaaaactatgaattcagaagcacaatttcttcaaggcccataggataaacgctgataggttgtgacaggttagtgccaataagtccttcactctaaaatttggcttgtatgactcttaggtaaaggcgactcgccattcaacctcaatttcaatagtgcattcttgaataccaaggccgggcggcagccacggcgtccttccaagccggaatcgggccgaaaagagcttgtatagttctgatcatttaaacaccacggcaacaacatcaggatcatatagtaaccgtgtaactttattggatgagcacattgactcatgtatctatttgtaatccgggcccgaccgccatgtcaaccccggagttccgtttagtgtaaatgtcattcaccccaatgcactatcccgggcggggcctattccgccattcctgggggatcttatgggagatttcaggtagggacaagtaatgatacaacttgaaggattcccccataagcatacatactaggatgtacatgccagtcaaaaattcctccttcttctatagttattcctactccgtagccttactccgtgtttcggttaatgacccgaaatcaaatagacttttaccccttcttccgtttgccgtcggtgtacctcgctattcggacatgtacggtattcgggagctcggcaaaactccgcggctccactggtggttaagggttctcccctataggcgaatgaacgtttttgcatagaacatttggggaaaacaaatcacggggtaatcactcaacaagcgggacttcgctgtgccagtctcccccacactactacagttcgcactccagttcccctcaaactggagacagtaatccgtcacggcctcaccggagcccccatgcgataaaacatatacatacctactcggacggctaaacgtaaaactcttatccggtgtggaagcaaaagtactgtcacaggtatgtctaccatctactgcacccaatagaaaactcttgaacaggaggaaataagaaatttccggtgagctcttccagtttgatatacctcaaaatactataaaaggcttatttgccggctgaatgtttcctccggggaaaacgctaccccggccaatgttcccactcatagcatcttcatgcagctgtaatcatcgccgtagcgtagcctcacgctcgaaccccatattatattgccccagtctatggggttttaggcgacatatgttgtggggagcttagttggggaaatttccacacccacagtccattagaatagcgggtattacttagggccacgttttagcaccccttgactcttcttcctccatctgtcttcgagcaaaatctttctggttttctcaccctgaccttcacttctacctcgcacgcacagctcgagctgtcacctcttcagctatgggcattctcacacttgctgaggatcggccaacgcccaagtccgtttacaactggcgtgtatatgcactcgccgtcattgcatcatgtggttccaatatgatcggctataccagtgccttcatcggtacgactatcacactctcctccttcatgaaggaattcggcctcgacgagatgtcttccacacaaaggagtctgattagcgagaacatcgtctcacttttcattgctggtgcctttttcggtgccctgggaacatatgccctaggccacttcatcggccgaaaatggagtttggctgttgctgccacggtattctttctcggagctggactacaactcggtgctaacagtgcccgggggctgggtatcctctacgctggtcgtgtgctgtccggtttgggtaccggtgtagcctcgaatatcattcccatatatctttccgaactagcgccccctgcaatccgaggacggctcgtcggtctatatgagcttggctggcagataggcggaatgttagggttttggattaatgtgagtctccctgtctctcgttgatcttttttttccccgtgttatctttgcattcaaagctaacctagatatggtagtatggtgttgagcaacacatgcctgaagtccacgagcaatggatcattccctttgctatccagctcgtcccctccggtctgcttttcataggtgccttgtggatcaaagaatctcctcgttggctgtttctcaaggaccgtcgccgcgaagcgatgaaaaatctttgctggatccgccaattggaggccgatgacatgtacatcaccgaagaggtagctgcgatcgatcaggctcttgagcatcagaagacttccatcggtattggcttctggaagcccttccaggctctcgctactaacaagagcgtcatgtaccgtcttatgctgggctgcatgctcttcttctggcaaaacggctccgggatcaatgccatcaactattactcccctaccattttcaaatcggtatgattgcgcctcatcagatgcatttctgataatcaattacttatgctaactcatgtttcttagatcggtgtcgacccgaataccgttaacctgatgaccggtatcttcggtgtcattaaggcggttatgaccttcgtgtggctcctgttcctggtcgatcaattcggaaggcgcaatctgctccttgttggtgctgtgactggatcgatctgtatgtgggtcatcggtgcctatatctgtgttgtcaagcccgaagataatgtcgccacgtctctgaacggcggaggcattgcggccatattcttcttctacctgtggactgcggtttacacccctacctggaatggtaccccttgggttatcaattccgtaagtcgctgcttattaccattctcaattaaacattttcctgaccatttattaggaattcttcgaccccaacttccgttccctggctcaggctgccacgactgcgagcaactggctctttaacttcctcgtctctcgcttcaccgaacagatgttcgccacgatgcactacggcgtgtacttcttcttcgcttcactgtcattcttggcattcttcttcgcgtttttcctcatccctgagaccagtggtgttcctcttgagaaggtcgaccgcctgttcgattgcaagcccgtctggagagcgaacaagatactcaaggccgcccttgcggaagaggaggagcagttccgctacgaggtcaaggaggcatcgtaccatgaggaaaacactggttcgatagctcctacgccttgagatgaggagagacaaatatgagcgatacagttacgaagagatatatagagctagtcaaaccttgtacagatgatcacgatgtatagacgctgaatagattatcatagacttatttttcaattgcccaaaactatacagtatgcttgaccaagagtttggagttttgggtaatggcagcccgggccagcaaaaacaccggagccgcagcgtagatcaggtcccccccccccccccccgcccctccgcaactcaccccannnnnnnnnnnnnnnnnnnnnnnnnnnnnnnnnnnnnnnnnnnnnnnnnnnnnnnnnnnnnnnnnnnnnnnnnnnnnnnnnnnnnnnnnaccccggggccgccgcggaggtcagggccccccccccccccggtgtttcaataactccaaagttcggatattattattctagttctctagttattactatacataatcgcgtctttaaaagcaaaaaaaccaggtttgacgactggggaagcgcataactgtggacattaggagctcaccatcacctagctttggccacttaggttcttaataatgaatttataagtatgtaatcccaggcataatataacacgcaatatacggtgtgagctcagactcatccacaagcaaactcctgcgccgtctgggcagtagcgagaaaccaaagcgcgctggttgcgaccacactcatttcgctgtatgctcgcgtggggataaacacagttcaaatggagttggtttgacgagaagacgaagaatgaatggaagagatttatgacagacatagaacacactcattgctaacatcatgcataatgattttgtggattggtgattcctggttcccttggccgatgacaggtctgatagcatgcatagtgagttgggcaatccctatttacatatatgatatcatctggcatatatagctctgtagatcgtttgctgatgaacattacgatcgctgcggttcattctcgattccagggttgtggctagtgcctacgtcatgccacgagatgggccctgcagggtatagatcagcactgatattgaagatgaaggagatgtgtcgggcacagtgggagttggtggttcttgatttcttcaattcataactagttatttgaagttgtcgctaatgacgatcttgttgcagtgcattttttttaatatgcttcacaaagttgtacacagcacacagccaggtttgcatattcaagtagtacaaaggcgcgaggggtcgcagatttgtcagctggtaagtctgattgatcaggcgaatatccaagacccttctccgtgtggctggattatttgaagctggcgatgtgtggaaagtgattgaaatccggggcacaaatacagtatatgtggcctaaaacatacccaatcagtcgtcgcaatcccagcagagtgtcctactccataaccttgctaaaaatgatgaacggggtactccgtacggagtagctccagatcataaaatcccaatcggcaatgaacgtgattaaggtgagaacattgcgattggttggacattgccaccagttttacattgtccaatgagagacatgggtctcaaaacgcgatcgttccaaggtcgacgcattctaaatttaggggaaccagatcctttgaggctttctaaaaatggcagggatcggctgataatctggaagccgacggaaaaagactagatgaacactatattgtatagactcaaagccaaagcgttcctttagagtatgttaactgtaactaccggtctaaaggcagaagaaggttaggtaatgttgacctcgagagtgcgcgagatggctgcttgcggaactagtttggccggtggcggcctagagttttttttcatgttacgttggctgattcctaagcctaggaaaaagcgagaataagccgaaataaagattttcactacggagtctacggagtttacggagtaggaatcggcaggatcgtctagggtcttgggggggttggggcagtgtagaggggcaaaaggctgggatgaccaaggtagctggggaccgtagttgatcatgactccaatgtacggggtaactacattatacagctaatagtaaagccaagtttaactgtttaatgaatgtcggttgcctgagagtggcttcactgcacgaccctggacgatctttttggctccactgagcgcttacgtcgtactgtggagttcaatgatatcaggaaaatcgaggaaaagaaaaagaaacgaaattcccattttctcttttcaacatacactcgttttgtcgccatgcaactgaatggctcccttttcggagctctcatcctcgtcctccagagtcttcagcttgtacaagcagagaacctcatccaagccaccgggctgacacaatgttccgatagtgccgaagtgaccgtcaataacttcaatgcgatattcacgccaaacaacaagtccatcagcatcatctttgatggctattccgaagtggccggagatgtgctcattgacgtggacctcctggtgtacggatacaaggcgtttaccaagtcgttcgatccatgcagtctcgatttgtcggtgttttgtcctatgaaagcaattgaactgcaaattcccaaaatcacccaaacattgggcgacagtgtcctctcgcaaataccatgttcgtccacacttccccgatagtcgcaaattctttcagggctcggagactccggaaattggtcttactaacggttacgtcatagcgatcgcctatagcgtccccgacatcgatgcagtgattcggctcaggctcaaatacaaaaattcaggtaaacagatcacttgtttggagacccgtgtccgcaatgggaaaacagtctaccagcgtggtgtgtcgtggacactcgctgtcatcaccggtcttggtctcatcatgtccacggtcatatcgcttctcggccattcgaacacggctacccatctcgtcttccgatcgcttgcattcctcggattcattcaaacacaggcgatggttgggatgtgttcaatggcattgccgccgtttgtgcaatcctggactcagaacatgcaatggagcttaggaattgtgcagctggatgctctgcagacaattgcgacctggtttcagcgcgccaccgggggtacaccttcgaccgtgcttgaatcggcgagtactgcatctgtcgtcttacagaagcgttccgccgggatccatcgcagagccgcagaggaaggaactcaaattcttcttcgcggtattaaacgggttggaattcgcgaaaacatcgaactgagcaacatctttatgaccggatatctattctattacttcgtcaccgcagtcatcgtcatctgtgtagggttggttctcctagtccggggtgttttagccaagaaacagacaatgcttccaaagttggatcgtgccatcagtgtcaccgcagattggaaaaccatcctccgcaataccttcttccggctggcatgcatcggatacccacagatgtgtatcctatgtctctgggaactgactcgtcacgactcagccgctgaaattgtcctggccattaccatgtggctggtcacgactgccgtcttagcctttgccacattcaaggtgttccaacgcgcgatacggtcgaaacagcagcacaacacacctgcgtacacgctctactccgacccggccactctgaaccagtggggtttcctatacatctactatcgcgctccggtctattacttcattgtcccagctctggtttacatcattgttaaaggaatggttattgccttcgctcagccttcaccgatcgcccagtcgatcattctgctcgttttggaactctccatgatgctcgcaacctccataatcaagccgttcatgagcaagggggctaatgtcgctgcaatcacgatgacggtaatgaattcgctcaatacgatattcatgcttgtttggacgaatatctttgaccaacctgagctcatgactggcatcctgggggtaatcttcttcatcctgaatgcgcttctcactctcttgctcctgatctaccttttggttggtatggtttacgccattttcttcaagaagcccgacaccaagtataaacctcttggcgatgaccgtgactctttccgctggtctcgcaccggaacgacgactgagttgtcgtccctcgagaagatcgcaagaggcgaggacgacacagaaggccaccctcatcccccgcccgtggtcactgctccgcccagcgacgaagatgtgtcaatggcagccaaaaggccatataatgatgttgtggacccttcgctgccgctcttcccagccagctatgaacgcacgcaacgatagtcgtgagcatttagagtcaatattttctctctttttctctctccttttctgtttttttttttttttttttttttgttttgaagcgagatttcttaattcctgcattcggtgcgtcggcgcttcgggtggctattgtacatattcaaaattttgacgttcaggaattgggctagataatatatgtttctagaaagctttttactgtgtttgctctacattgaatatgaacacctaattaaacctttcatttcggaataaagacgtcttaagaccgcgccaaatctgactcctttgccaaaggatttactctgctccaagtcttctaggaattgcaaggttattgccagaagagcatcagcgtcagggtctcgacagccgagaaataaatttcccgaaaaaaagaagcattagcttagtccattttattgtctttacaaggggagcgtgtgtcaagtgctagctggtcaaaggcatctggtctggctgtcatacaaaatgccctatgaggaaatgtcattccgatgttgatatctcttcgcacgttgtcttctagttcttttatcattatgatttgattacctatcatcaattgcttacatctgattaagttgctatatattgtctagctgagcattgtgagaattggttatcaccttggctttcttttcccagctcctaacatagacgtaaagaaacgaattgataccaacaccatttagttagttacagcttatctttcacataatcaatccaagggcactccaggaatgcggctgtgctaccatcccttgattcaggcgaccaacatgcgagtcttataaatatcaaatttgcatgcgtgttagtcaaggctgagcatattacgattctcgtttatagttgtacacactctgacagtgtcatcccaagacccagaatagactcgtcatctggaccaagacggacttagcgagtagccatccgattccgagtcaggccccttgtttgcagccaactcgaggagatatgactggggtgtgcgcagttcgatgaggtggcttaccggaaaaagctggataaaataagccggctgcataggccacgttcacacgcgtggaaaaatgcgacgtctccagtacggagtatctgtcagctgtttcagactcgacgctccacttcgctctcggtgcatatgtagctatggtcgaaacacatgttgcgatggtaacaagctgcagctactccgtgcactttcggcatctatgccggaacccactgtggattaagttgatccattaagttgcgtttcagactgaggcgtcctgggtgattggcaaggtgagtcaaatgagggagatgtgtggacgatcccttccccttctgtcaacatccttgccccttggatgatccgtttttggacaagtttggcttttttttctttatgataggtaaaatcccaaggagcgaagaagggtctcattattgagtttctgtaagcttcaggggctagatttcagtctaaaaaaagaatgagctcttgaccttaatttccccagggctgagaccgttgtgggattagagcacatcacaaactaaacgccattgcattccgtaccaccaggtcagctcacctgggacgaatgatcggcttaggtgttcgggcttagcgagccaagtgattgacgccgtaggtgtatgtagataaggttgctggaattccgccagacgtgccttgcatatcccaacaggagaccctgtcaaacatttcttaaaggaatgagcgaattcggacacgcgtgggaaaagcaaccttattattcctgaaacacaggtttccatatggcgagtgtggcttgggcttagccaagaattgaaaaatgaaacccaataatggggtatatctgcatagttagtgtacaacataacgccgtccgaaaagtctgtctgcggacatccgttatttccgaggatgcttccttaaaacatagagatcagcgccagcacacttggtaggtagcctttagctagacgccgtgctcgttgccctattttgtagatatgtaaacgcctttgatcagcggataggcctaggtcttagtggcactaaaaagcaaaatactattactgctgtttccttcctgggatgtcccaatctttggactcgtcataatcggctttaacaaggcaatccatgtgccccttttcttaggcaagctcagttcaagtttccgaaaataagtcactcgcatttcggagatcttcagttctctatgcagtatactagtatctagtcagttaagcattcctatatttgtaataatagcgatgcaaaataacctttagggctcaaggctggcaaggcatggctggtatggacctgctactatcaaagtatcctgcggcaatagtggcttgccttatcccgactcgtcgttgagggatctgcagggttgttctcaggaaagggaaatgaaggaagcatgcagcagacgcgcgtgggccggggaatgtagcatggtgagccttgttctattttatttatctttttgacctcttagagctgagtccctgggtcaagacatatgttcatgaccatgtgatcgaccacgttagtccccgacattgtttcaccctagagggagcgaggatacacggacattgcgaagcgcttgtaccgccaagggttccggatttgtttgtttcaacgggttctagacttgtcttgttcctgtttttttttttaaaaaaaggagatccttgtttgatagctctgtcgaatatccgtttgcagaaactcgagttgatgtttatttcaccccctcacttcattccacagcacatatgtagaaagtctggatattccgaaacctgaaacatgcggctggccatgtgccgaagaggaatgttggatttacgctcaggatgatcgtgaaagcgggtcttagtccacgcatccatatgcggctggtacctgcctctcctagccccggttacctgcatttcagccaatgacaacagacatatcgcttgttttgcgtagatgagccgacgggtatgtgcttttttgctatggaccctcggagtttcccgctaaacgaataccagaactggcatggttcatgcggactcagtcttggcgaacgttgagctcaagggtcgagatgccgtcacaggcccatggcaggcggaggttatgcactcggtgaagatcttttcctcgttttctccttcgtttaacttgtactgtccatgtgggctatgatgcgaagctcaaactcgcgtgtccggccgcaaaggcatgccgtcctcatgcatagcgtcagacctgcagtgtatatataagagcttccgctcagttgtatcctggtcatcatccactcagaaactcatcaattcattcgtctctacagttccttttcaaacataccgatcaaagccaagcacatacctcgctcttgagcaccacactaccccaaccctccttctttctactgggcctcttcccggtgacctgactctttgattcgcttgaaccgcttgcgaagacctcacgtttatcaccaacaaccaactacacatcatgtctatcccggtcccggaacccagaaccacatcgtgagtgtatctatatcaaagtgcatccttttaacaatgaactaaccggcttttcctagtgttgccaacggcaccagtaccaacgccttaagccaaggcaacgtcagccaagtgccggcaagcaaccgcagcagtgtggaacgattcgcacgagcaccagcctccgaaggcccttacttcgccaatgcgcggatgccagagagatcggcacacctcgcggcgctatcaagccaactcaatgccatagaggagattatgaagactgggagttagaagatcaaagcaaatgaataaatgaataaataaattatccaacaccagcttctatgtatagtcggtctattaaatggaacgcaacgaaaaaccaatgaaggcggatatatcccgaaactccccctcaaagagtggatagattccgtaaacccttgttcatagtatatcgaagatgtaagatgctacttcctcgtacttggtgctggggaactcatgtcccgcttcgtaaaacttgaagacaacattgccatccagggcagccgtggcatctggaacaagttcacttttgacaatgattgaatcactattaccacacagaatgtgcactttgttatccgccggccttttatcttcattgcttgaggcgctattctgtgcagttaaatactcaccgagacgcgcccatgtgttccattggcgctctcgaaggattggaccataacgcatgctagacatgaacgcgtggacaaaccccttgttattattcacctgccacgccacggtagacgggatgttgatgtggggatactctcgggacagaatttgagttgctgcagcgctctgggatggcagttcttcggtgagtacatccgcggcactgggtttctcgttcttgggcttggacgaggccaaggggcctgccttcagccgacggctaaccaaggatgctaagatattctcaggcataagaccctttgagtaaaggagtcgactttggaaactgatatgcgaatcgcggagcaatcccgaaggggctaggagcaccaatgacgacagaagcttaggaaagtaggatgcaaaggcagccgcaatgccacctcccagagagtacccggtaaggcagaatttaccggactctgcacctgtccaagagataggcgatgatgtcagagcgaggaagatctgtgtcgagaagaggcggtcatcttgtggaagatcagcagggcagtcggagtatcctcttccgaacctatttttcaagggtcagcgataatacaaagtgttgaatgttgtgcaacacgtacaagtcaaatagcatcacacggcagccgcggtccaccaacgcatgggccaccccgccgagcgagatacacggtgtggtgataccgtgcacgaacaacaccttgggtccatcttctgggccccattcatacactcgcatagacccgtatgggctagcgacatcgcgagcaccgggcagggcatcagccgggagaggcaatttacgattctccgactcgggtaagactgtcgaccgaggcgatacgagaacagtcgggagcgattcgttttgagggaacaccgatcgagcgagtagaccaagtgtgaatgaagccccagtcactgctagcaaagggatctgagtctgatggtttgagaatgcaccagaaaggaaatccacagtttcgttgtacaggcccatggttgcaattgcgggaagtcacccctgaaacaaccgtagaagcaagttcgtcgaagattggaaaggtgttgtgatgtaatattgacgacctgaaccgacgagagtaatgaagggaggtaccactctgcaatgagggtaaacgaatgcaccgagttggaagacactagtgcttgagggctgcgaccgaggctcaccgcgctgccgtgttgacgccatgtgcctgcccaaatggtaagattagataagataagataaggataaacctcggcagttcggtcaactggtcagtcttggaagtatagagacccattcattcaacaccagttaaactacagaatataatcagcaggaccctcaaatgtttatttcaaaaaaataataacatcagatggtcctctccttcacagaatgtgtgacaggtccgccctcacacgctgcccgagccagccaatgacactaaggaatgttgttttcccacaatatctcacgtggtggctatctatagaccaagttattttcagtataagtagctaatcaatggtattctacgataattcagtgataattcagtgaagaggaatgtgcggtagtcgtgggtgtgaaattcagcagacgaggtcatccaacaacgtacgtgtgcgatggataaatggattgaacccatgactctcctatggtcaaccagttctgcaagaggatttgcagatcaaggtctagacatgaaggacaaagtgtactttgaccaagaaaatagcacagagagagaaaggaagtatagaaatacctaaaggcggccctaaggcaccaggcgcaggcctaagagaaaccatatagttactccgtacaagcgcaaagcttcatattatagatattgacttttgtattcaatcttcttcgggtgaacattagggctaaaataaattacaatttgggacctagtcaatccgacaaaggagggaaaggtcggatgaagctagaagcaaaagttagcaagggactcatttggaactggaataatagggacacatactgagcaggacactcatacccagcagggttattttgaagatagagctggtgatattcctccgcatcccaccactggcctgctggcaggatcttggtagaaagcggagttttataccactgcttgctgaccttgtctgtaatctcttgtgcgatcttttgctgctcttccccgtgcgtaaatatcgcactacggtactgtgtgccgacatctggaccctgccggttttctgttgtggggtcgtgcatgcggtagaagaattcaaggagctgacggtaggtcacaatcgagggatcaaagactatccggagggcctcggcatctgtggaaagaaaaaaaaagtaagtattcgaaggtgcgatcgcgataagaaattccgcgttatttctatcagatagcacggcacttacggccagttgaaccggagcagacagctcgataagttggcgacggaactgggccaccgcaatagcccaccttagcgtcgagtaggcctttgccgttgccgaaattcttgcggtacaagtgctcaacgccccaaaagcagccagctgctacggtcgcggtctccgtgccaggcattttgcgggatttggtttctgatgtcaagggaaaagctgagctggtggagaaggaacgaaagaagcgtgagaaaagggtcgaggcaaccggagcgacgaaagtcattggaaattctggtgatggtggagacgtacttgataagtggggatgctcgcgggttcgaaagtgaaagggaccgtacaggatgctgtaagactaatgaaaggggagcaatttgaagggaataaatataaaaatcaaagtctcagaacaaagagtgagagggaggaaagggaagaaatagaagggagctcgagattagagcttcgcgatggcgtcatcccagaatttacaaagcagcgcggggaattcgacagggatggaaagattagggcttccagcagccctatccgagtattattgtgattgtacaagagctgccctccagctgaaaaccaacaatgcaagaacagagagataataacaggcgaaatccaataagaattctgtcgtacaaatgtacaaaaaagaaatgtggtatctgctacgccaacaaaacaccagttccaaacaagtcaaaacaaaatcaaagctagtcatgaataatttcaagtcattcaccagagcccactaccacgcttgcgagttatggtcggcagcagggggtgctgccatcgcactgagacggatggcctctctgctggaaaggctgatatttcgaggtcggccgtctccacccaatgttgtgcggcggcccgtgttcttcataactgggagagtgtgaggactcaagacccgaggcttgacatcgtgttctttctcgcttttgaccatgcgccgcgcttgtgatgcagtgaacatgtggttgtctgcgggcggagtcccataggtagtagaagtcgggctgcgacggcggtgaacacgcagagtattggaggatgggttaaacagtccactaggaatccgtccattagacatacgtcgcatggctgaattgatcttaattgcatcttccttgtccgacttccagttgaccctgttttcagataccggactgctggagaagttgccgctgggactacgaactgcaatccgcgacggacgatccgtcgaggggcggttcataaagctgcttccttcaatatcacggaggggagagctatctctttttgaaagaggaaggctggatgacgggggtggtgccaatggtgagctgccatttctcttggccaagaatcctgccttaaagcgactgctgttcttttgaatgttcaaggtagacccagtggattcatcaggtgtaggtgaaatagaaccggccgggctgataaccctcggaatatttcgtggaatgggagatcccgatcgaggtggcaaccatgacttttcaaagctagtttcatctgcagagtcgaccttcttaggggtcttttggaactcggtcaaagtgccgtcttcctcatcgtccttccatcggacggatcgcttgggaattttcatctggactttctttggcgaaaaactgacactcttccggccggcagtgcctctacggcgacgtggagatcctttagttggtgaagcaggagcatcaggggtgagtgtggttggaggattggcgctcgatacttgtggcaagctcaccaagctgaagcgcttctttgtttttgtggggcttgcaggcctagcagagctgaggttcgggacagacggcatggtaccgtctggtttgacaaggttggttgctgcatctgaacaatcctctaacatctttgtaaggatagtccgcccctttttgagagcctcgttggcgtttagctgcatgatatcctcgatggagttcatcatctcaaactgtgcttgcaacagaagctgcacggcagcagcttctccagccttgtcctgttctagcacagcggtcaatgcttcgcgctctgcattggaccgaagaagatctgcttctcggttcaaattggcatagtcgctgttatcggtaatgtcaaactcttgaagctgctttgccgcgttctccaccgccgagttcaccgctcggtcccaagtgctctttgctaatttctggttgtaatgatgtctgctaccttccagttcaagaaggattccctgtgcagatttgcggacagcatataggttcgataagccctcctcagtttcatgcgcggcgcaaacattatcaaaggccgcaatccaggacgataaaatgccaattctgcggccgatttgccttagtttcagcatgttgttcgtcttctcttgtctttcgggtaacgtatgttcgtaggcattgcgaatccgggaaacgccctcgcgcaagacagcgtctttcttctcaccttgcttgcggaacttagtgaaggctgccttttcgtagtcttttgcctgtgctttgagctcattgatcaaattcatttgctcgtcgatcttgaccaaaaagtccttcacgtgtcggttaacgttgaacacatttcgtgtgaccttagtctggatgttcttcgctcgattcgcatatcgaagtgtattttgggtctcgtcaaagtgctggcttgaggggctgacacagacaatcatcactgtcttgcaattgccaccaagagcaaacttaagtaatcgagtgagctttgagttacgataggggatgtggttacgctttcgagggtcgcaaagtgcattgatgcaacttcccagggacaacagagacttgttgatattggcgccttcgaacaaacgttctcccctgttctgtgtcgcgctggcacgctcacttcccgctaaatcgatgatactgaaagtggccatagtgtgaggctcattgacgtcggcatttcggtctttttgggcgatgttgatttgaaggacggcatgcgatcttgatgaagtagcatttgctgccgtaggagacatggtgcgacgctcgttgccttgcatgatcatgtccattacctctcccacattgtgcgggtggtagcttgacagcccagcaactgagaccgactggttggaatcctcccgcagcatcagtccaccctttccactgctaccacaagggacaagcaagtcacgaatggtttcattatagatttcgaggtaggaaagagaaatttcggtcgatttttcgtctgcccgttcgtcaatccgctcaaaaagctcctgcatagtgagaaagatgataccgggctgttgggcagtcccggtgattgtatgggtctttccacatccagtagctccgtacgcaaatactgtcgcattgtatccatcgagcacgttgtcgagcaggctgcgtgttgtagattcgtatacctctccctgggaggcattttggtcgaagatgcgatcgaaggcgaatgtttggtccttgacacgcttaccatttggcaccacgctcctagagaacttttggacgggattgtcctctggggggtcaaacaccctagtccggttaggatgttggacccaaaacgttcaaaatacatggaatactcacaagcaacggtcgtcaatcactttaacgatggatcgtatacccttctggttaagcttcggcgtcggcgcacccgcgagggaaccatcgcctaggaacagcggaccctcgtcacatcgtgtgatctgggctgcctctctgatagtaaatggtcgtactctgactgtaacgctgatcgaggaagcgccgtcggaggcagccatgttggaaggtcgggtcggatcaaccccaagtcgcgaggtgtcttgcggggccggtacgtcaggcggttgacgacaccctgcaatggcaaagccaagggggaaacttagctatttgtcaaaatcaaagaatgtagaaaagttgaagaatggatctaaaggtgtatggggtagggggtgcaggtattctccgagaggggctccttgaagcgatttcatttgttgatgcgtgtatatgttgtcatctagtggttgctccgagcaaccgtttcatagtggtatttggtcatttaggcgtggcaataccagtcattcaatacaaagagttcttagtcacatgatatgttgtgtgtttcaggttctgaacacgtcccgtccactttgttcacagccactatgttcaagttcgccggccaaattgcggttattaggcctttcatagtattaacctcaatatgctaagacaaaagctgtaaatagctaggaggagattatgatcgtattatgacattgactaacattgtaacgatttcagtgaataacaccaatctttaccataaagcgggtatatttgctctcgagatatggaaaatttatgaataaaaatcatcgctttcgtgttgctattgtcctagtaatatcatttttcgtctgcacaaacatcatatgatagtttgaccaccagagcctcctgaaacgccgaaggccatagagatgtatcctctgaccctagttcttcctcgcaaatcataatggccctattattgttcctctggctcatcttcataggtcggcatgatgacatcccagcccggatcttcaccatcaaggtccatatcaagaccgccactctgatcctcggtggatttgtggaagcggaaggcaattgaatatccgttctctagatcggcttccattacagttggtgagtcattttggttcatatttcttttcggggcaccctcgttgtccattcctggtacatctgcctggaggcgtttccagcctttttcgaggtccgctcggtcgacaggctcaccgaactcaacatcggaggtggagtcaggaacaatgtcgccattaatgttggtaatatttcgcgatttcagagcatccagaagcctttttttgacgaagtagagtgactcgtggggttggagcatcagaaggacagtggttttatgcttcttgaagaggacggtcacagcgcgcgagtcggttttggattgcctgggaggctgcttgataattagccatcctgcattcgatgatatttacttgaagatatcaattctcataccatcttagaggctgcggggaaattaaagggtaggtcgcgtctgtaattgattatttgggagtgacggaaggtggagaatccggcgggactccgacttccgcgctccgaatctctgagctctgccagcatctcacattcaccacgctctctatagccagcccttgaaattggttgctagtatcctcattcttcctttacaagcttcaccatggatgccaatcaccccccatctaccgactcacagcataattccatcgtcctcaggatcgtccactgggacaagctgtttgaatccgacagccctccacggttaggaattgagttcggcaagcggttaccgtatgctaccctatcggctttttcgactggtctggcattagggtactaccacggcagcaaaagggcagggctcgtgtttcgggctgagaatgcgcatcgtttccccacgacatcaacagggtggttccagtaccataaaacgaaaaactatattggcgtggttggaggggtcaaggatggtatgaagatgggattcaagctaggtgctggcgcacttgcattctgtctgtttgaggaaacagtggactatgctcggcatgacgagagagactttttatcgacggtcactgccgggctatcattctccggaatctacagcttgcttggtaaggaaactattccacttggacatcaatactaggggaaccgaagctgacctagcttgcatacagctcgtcacgatgtgtacactgccgcccgcacagcgaagcttgggttgaaattgagcttgacctacggtcttctgcaagatgctcttgggactttgaaaggaaaccgccctgcctatgttgatttcctcctcggcaaccggcggtccaaagtcgataaagaagcatcaatgtgatcataggcggacccatatcagaatggtcccttagatccttctttgtgcgcatgccccagtctcgcggcaggcttgagagacccccaatgccgataaacaatattaggctctcccacttcactccctaggacactcttcggcctacgcatgctactgcaggtggtatgcattcgacgccggcgagatgagccacatatccgagtcaatgccgccccaattactatgtctaggcctcgagccactctgaggtttttagtcggtgagcacggcctctctccgtctgatcgtgtgtttttcagaagcaacacccacactgtactcttggttacttgtattatttacattttttgataccccctcgtccaattagcatcgaaccaatgaacattatttttccttggggtgctatgtacatagtgacacgtgacccgccggattctgtgttggggttatgatcatgcaccaagtcgattagcaacgccattgtggcgtgactagatcgcattcggactaaaatattaaggcattctataaacatccaacgattggcgtaggattactacgtggctacatggccctgaaataatataattataaaaaaagtctgacggttaccccgacacaacgatgtagagaaacaaagtaaactagctgattccgggccctgacagcgaaatctacgtacttcgtatatcttcccaattggcgtccacggatctttctttgtctccggggataagcaaatagagaagatcggcccgaatgctgcaggttcaaaggatggtgattgaccgctcagtgctgtcccccactttttttcaaaaggaaagaaagaaacgtcttcaagaccaatatgtatctatattgatctatagtgatctatattggcttacaagactagaatacgtcaaatcccaaagtggaggttcccatagagtttccgaaggcacccaggtgatcggtggagaaaccgcatttgacgtcgctgattcggaaaaccccccacctcaacaccttagctcgaacttgtcgtgtccgacctttttttccccaatcttcgcttctcctctataccttacgtccatgtctgtccgttaaactccgcgatagcaattgggcgaagatgccgatgcgaggttcgacgctgctttcgtcgacgtcatcgatttattgacctctttaatgcctgggagaaataattgaatcatccatcccacatcttcattcagactcgtgaactgcatcacaatgcgtcgccatggcaggtccagtggcggtccaaccaaggccgtctcgcccttgtccgacactgtatccctcatacgttcattcgattcggtcatgaacccaaaccgacccgcgcgcccctcacccttggcttcctctcacatccaagctttgcccttggaactagtagatcggttgcggtctttcccgctgtttcaagctaccccggaatccttcctgatcgaggttggacagcacctgcgtccacagctccacgcacccaacgattatatcttgacggaaggcgatgagtcaaaggcaatatactggctggtgcggggtgccgtctcggtcacatctcgcgatggcgagagcatatacgccgagctcaaacccggtgcgttcttcggggagattggattactcatggaccgtcctcgtactgcgaccatcatcgcccggactcgatgcatgctggtcgtgctgacaaaagacgactttcggaatatattgcctcggtatccggaggtagaacaggcgatccgggaggaggcggaggaacgattgatgattttagaaaagaaaaaaaaggaaacgtcagcgcctgcactggatatgccgagcccggcacgaagaggctcaaaaagactgcgtgaaagcatttcaaagggtctagctgttgccgaggatgatggagacgtcagtgccaagtctgtgtacaagaagaggaagtcaccgagtcccggtcggcgggatggctccagtgcattagcaaatggattggtcaacgtacgtctcttactgaaagagctgccgcttttttctggcttgcctgccgatatcctccactaccttggtctcaatgcccaaccgcgatctttccctccatttaccgacatcatacaacaaaattcccagggccgtgagctctacttcattgttcgcggcgaggtagaggttcttactgaaaaggcggagatggaccactcgtcggcaaacaaaacaagcccaaatgggcacatcgaacagccgggaattgaggtcaaagctaggctgaagcaagggcaatactttggcgaggtggtcagcctagatttggcacctcggcgaaccgccaccgttcgatctgtgacttcagttgagtgtttgatgctcggcggtgacgtcctggctaaattttgggagaaatgccctagtgacgtgcgagaacaagtccaacgcactgcccaggcaaggctccaggcggcagccgatggcgatgttattatgtctgacgaggcggactcacagccgtctcttggtgatctcgccctcgacgacagggtgaagatcacatcatcccggcggcggtcaatgccactacttaccctcactgaaaccgagctggatggaccacatcaatcctcaaatgctgaagaccaagaccaggacgtgctgcggccctcagatcccgatccatacttcagcatgggtctagataaagtccggatgcgaagtcgacgtggctcgctggcacctctagcccccgaggaggtatcaagagagcagcagcgctcatctcctacagagctgtgctctgccagttcttcaaccctcgccctttctgaaactgctagcctttccaagtcatatcataccgaacggccccgggtcgatggtaccaatggattactcccagacagtgtattgctgaacattttccaattccttgagcttcaccaacttcttcggattagggcggtgtcatcccattggtcagatctcttgaccagatctgcggacgtgattcatgatctggatttgagcgtctacaatcgtaggattacagatgacgttcttgttaaaatcatctgtccgtttattggcaatcgagcccgatcggtcaatatcaacaactgctttcatattaccgacgaaggcttcacagtattggccgcgacttgtgccccaaatatcaccgcgtggaagatgaagagtgtgtgggatgtaacggcctctgccattcttgacatgtccagcaaagctacaaatatacaggagatagacttgagcaattgccgcaaggtcggcgatacacttctcgcccggatcattggatgggtagtgcccgccgaccagacgatgggcgagaagcagtcatcgatcaaacctacaatacagacagcagaatttacagtgtacggctgtccaaagttaaagaaacttactctttcttactgcaaacatgtcaccgatcgatctatgcatcacattgcgtctcatgccgctggtcggattgaggaaatggatttgactcgctgcaccacaatcacagatcaagggttcaaatactgggggaatgctcagttcactaacctgcggaagctttgcttagcagattgcacgtatttgacggacaacgccatcgtgcatctaactaatgcagccaaaaacttggaggaattagatttggtaagctattctttgtcgggctctgtcgaactagaaataccatggtttactaatcgccaccagactttttgctgcgcattgtcagatacggcaaccgaggtccttgccttgcagtgctcacatttgaagtatctcaacatggcgttttgcggctctgcaatttccgatccctccttaaggagcattggtctccacctactttctcttcaacatttatcagtccgtggctgtgttcgagtcactggagtgggtgtggaggctgttgcggagggctgccaccaactccgggttttcgatgtcagtcaatgcaagaatcttgcaccgtggcttgaggacggtggtgctgttcactatcaaccgagagtcgaattcaaaaccgtcgccccgaacaagaagcttcctcgattaggaagcaacacatacaaagcttaacctcttcattgcacactcttacgctggtttctctaccgttaccttttccccctctacaacgacgcctggcgcgacgcccgtccatcctccatcctccaagttgcatgatacatttattgatagatgatgtacgcctctctaatcttcttctcattaatttctaggcttaccattctctagtttccgctttgccatccctaactgatcgatctcggcgtttgaatttaccaggacaatcttttcacattcggattcattcttctcgcgtcgggctgcaggttcttgtttttacattttggtgggggtttcggtctagcctgtgggcaggtcaagcatggccggagttcagagattgaaagcatctacgagttacatggtgtttgtctgttttccttaatattcagtgttttggggctatcttgtatcctttcttacgatgtaacgatgcacatctatttgattttatcgacatttctttctgtattttaaggtccttgatgctatctatttctggtttgtagaaattcatttgactataaagccgaaggtcttgtagcgcatgctatagtgccaagcccaaatcatatacaacattgaacgcttttccaaggttttacattacacctacacaatccatatgtctctacccttggaagttgtaaacataaaacttcaacttatagcctaaaaatgtcctttgtgaagtcttttctgccccctttgtcacctcttcgctttcttggaatctttatcgggccttgtctcaacctatttaagatcgtgtatgaacattcattgagacgaagacaaagagcccaatgagcattgtagtatgttctgttataccttttcatcagtccccatgctcttcctatctactctatctcagattgacttttcgaaatctgaactcgctgaccgaaaattatgtgctgtgttataaatagaggataatatatcgccatcaatccccacgctggcttgaaaaacgaaaaattgcagacatcagccagttctgcttacttacaatggtggctgctttgatatatagtacactcagcatactgtctatactctgtcttcggcttctatgtatttcacaaggtctagatttcttttcactgtgtccgtgttatgctgtttcgggtggccgtatcacgatcttttcgctggtcgttcatatcatttccatggtatttacttcgtgatcttatatataaagtgcctctctttatggtccatcagtcggctgatcaagatgcgatgccattcgtgcctaaacagagcatgtctccccaaaaccccagcttgctgtcttttcccacatttagccgaatcgtcaatttgaatcatccttcccctggtctctttaggggcccaataatactgcctgaataacgtatggactacgaaatgtaagctacagataggactagccgaaagaatacgaaaggcagagatttgaaaaggatatgaggtgacccaccctcgagggagccggacatgggcgagcctggcaattgtggatgtgatggggctaggataataccttcttcaaccgctgagggagaagagtagctactgacggggttgtccaaacctactgaagcggcatgtgctgcactagcaatggtctagtggagagatctatcatcacagtccacccggaccgagaccccgacagccggctcatcgcggcctacagcagtggggcactctggtaagcggtcctttccctttgattctagatcggctttctgtgctgttttcatgtaggccatcatattcagtggcaattagacgaattccatttgacatatagtactttgtactcacaaggcggggaagatcctcctcttgaagtccagggcaaggggaattggtgaaacatctgttctcaaagagaagcgcaagactgccttctatttagcataactcaactgccagcaggatctcgttgttttgcacaagcttttagttgagaaatttagcataagatgtgaagtgagtttggtaatagcaattacagccgccagccagccgagcacggtacaggcatataaatggcaccggctcgatctacctctagtctgacttttgaggatttatatatgcaagttggtctcaacgaaccaagggtcagctgaaagtgtgtcgatctgacggcgatcaacagatctagggtttctcacagcagtggaaaacttgttttcctttttttcttgacctagcatatgtaaacattctaatagacaggtctatttatgtgtttatgtctcaaaacaatagaactataccagaatcttaaaactatatgacaagtattgtggagtaggtatagcactaagctagaaggggcaaacgaacacacagcgcagatgttgaacattggagaaaacgtgccatgtgtattttgaatccgacctggtctgctctttaacaatgccgtcatacaatgctatcatataatacagtctgataaaaaccagttaaactacagcaaaagcaaccaataatcaaacccccttacattccacaccccttggtttattgtagtagatctaatgacgcatgtgtagttactcatgtatgtagatcagagattgccaaaacttatgtatgtagatcgaaacattccttctagaaggatacctgaaaacaatcggttgctggccagcggtgaggtacccggatgagggttatgcttatcttgaccgttatcggtctccccctattattatcgccgcacccagccgagaacgagaacgatctctcataatgcatgcccgtgccagacactagtgatccgcgtccctgcccagtgcttggtgtatccgccggtgcctagcgactgactgacaactgagacagataaggttagatcatattggatcacggtcctaataggcaggagtcgctagtcaagtcttgggggcaaaagtgagcttcctagtgcggaatacaggtgcttggtgccgagtccgccgagagagaataatgagtgtagcgagctcttggtagcttgtggcagcctaatgcgagggtcacgcatggagtacggaggaaattatcgaattttaaggtctgatttctcttctttgtcctaatggctacatttaccttcggctggcctcattggttcaagtcaagacgccccgagaacggacatcggatgtccgacccaaggggtatcaaagtatatatcgtacagtatacgtacacagcaagaaaatgtactccgcactccgcatggtacatcatattcagaataacattgtcgatacacggggtatggagtatgttgtacgaagtatatatggagtcgacattgtctgaactggtttatctgcggagaaaggaaaagggaaagtggaaaagtaccaatgctcgcactagtactgtatctagtgtactccgtacagcaatttccgacgacaaacacctggggtgtctcacttctcaacggtcacgcattggctgctggccatcattggtcagataagaataatttggctcaaagctaagattggctaatttggtcaaattagcgtatcttttttcctttgtcataccatgatcacctgcgcaggatcagctgttcatcacgaacttaaaataccagaatactatacattaccatgcaataccacgcacagacggaaccccccgaacctctccacaaaaaaaagggaaaaaataaagaataaaaaatagacgagcaaataccagccaatcagaatcagcccaggcttagataattgaccctttggcttcgacccgtggaccctaccttccaaggtcgacggcgtccatcctgattgggttagcgcctgtcaattcatgttttcatgttttcagtccacggaggggagggataactaccatgcatggtattaataactatcgcctcccctccgttttcattctctttcgatcagacaacattgaactgctttcgttctaaataatcatcgcctttgcagtggatataatcttcacttgctgcctctcatttatatcaacatctaacttatactatcgccccctttttttgtttccccacattttccctcgtttcctgtggcttggattcaaatcattcgatattctgtcatttccactgtacataccaacagtacatatataatggttcgcttcgtgacacctttgctcctggcctcgctgtcagtgaccgccttcgccgcgcaatcctgcagctccagcagccagtgtgacgagaaatacccctgctgctcccgtgagtgatactccctctagatcgcaattgatagctaacaagtcattcaaatctagaatatggtgagtgcggtactggtgcctactgcctgggcggttgcgaccctcttgcatcgttctctctcgattcatgcgctcctatgcccgtctgcgaggataagacttacaactggaacaacctcaacaattccgtcacccaggacaagtacctcggtaacgccagcactgccgactggacctacagcggaaaggtgaaaaccgaggatggcaatctgatcatgaccatgcctgccaacagtgtcggtactctcttcgccaacaaccactacatctggtacggcaaggtttccggaaagattaagagctcccgcggcaagggtgtcgtgactgcttttattcttctgtccgatgtcaaggacgaaatcgactacgagtgggtcggtgctgatttgaccgccgtgcagaccaactactactggcagggtgttctggactgtaagtcaaaagcaacaaggaatatctgatcccaataataaatactgacttgatgaaccaggggagaacgccggcaacatcagcgtggatggcgaggacaccttcaatgactggcacacttacgagatcgattggacccctgagaaggtcgactgggtcgtcgacggctccgtgcgccgcactttgaaaaaggccgacacctacaacgagacctccaagcagtacgagttcccccagacaccctctcgccttcaaatgtcgctctggcccgccggccaggccagcaacgcccagggtaccattgactgggccggtggtgatatcgactggaacagcgaggacatccagaccgtcggctacgactatgccatggtcggcgaggtcagcgttcagtgctacgatgctccttccgacgtcaccaagaccggcgacaacgcctatatctacaccaaatcttctgctatggagagcgatatctccatcaccgacaactccaccgtccttgcctcgctgggcgccaccggtctcgacatggatcttggtgctgacaaatcttctgcatcctcctctgcgtccaatagcatccccaccagcaacggtggctccggtggcatgaccagcaacatcaccagctctggtgaatctaactccagctccagctctggtacttccaccacggatagctcggggacttccacttcgggcttcacccagggaaccgctacccaagacagcggtgcggccagccaaaatgagcgtgtcctccgtggctcgctcttcggcgtcctggtggctcttgttgtccttgtgacaatttaaattttttgctggtttgatctatatatcagcgttttgtccttattattttctttcttgccatgcttattgcacagcattgggtacattttttgttgactactgtgcaactttgcttcgtgtctatctctgaccgaccttgaacaaacacttaatgaatacctttgttccttgtatattttttttccttctcttttttttatcctccttcttgtcccttcattaggttgtgatgttcaacggttgactgcatacgtgtctgcattttccctccattttattgtttaacatacacctccctggcgttcttggccgattcatgctctgtcggtttatttttgattgatgtaccactattctggtaatgacttgtgattccctgcacatgactggaaaatacccacaagctccctgtgatctttgttcatatttaatctctatagcttcctctttctgcgttaatttttatttgccgctttttgaccactgataaaactgagcccttattgtgtaaccaataagcttgtctggaactaactaggcagtctgccgggaagtgaccaatgagacatttcttcaatatttgagcatgcaaaatagatatgaatatagaatgataacaaacagcgttgaaaggagcatataaacatagaaaagaatgcgtgaaccacaaaatgactatttccaagaagtcatacccagctttacgccgatttctcagccttgatctttacttcctccaccttcaattcctccttgagaggctttcttgcccacacgcgattcctgaaatatatcagcatgagtaaatccagcgatccgatccgaaagcaaacttacgcaggctcataagcgtgaatacgcgggttgttcagctccttgcgcactttaaccagaaacacctgcacctcctcctttgaccacggctctggctctccaaagtgagtgagaagccacatcgcccaaccctctagagcggcgttccaatggctatgctggaggtgtccggcctccttcagtatattatccctggcccaacatcctagaggaatcttgtacttttcctcatgcacgtccacgaacccggcttcctcgatggcgctacgcattgtttcgtgggttctgagtgaccgtcctgctcgttcggagcatccgataaaaatgtcgccccaaccatatagctggtgttctttcgtcaaggtgccgtcatcgctgtagactcgcacgtctaattcgatttgttcgatccagccaccaggctctagggcactagtgagagatgaaagaaattagggcgccatgtctcggaaagtcgattagtagggaattggaactcactcgtaggcctgtttgtatagcttttgccatccatcgggagggaaggcgccatacatgaggcgcatgtggataaagtcaaacggctctctccatgtccactcgcgaagcacatcatccacctcgaagatgcagttcgggggcatccataacacgggtgggggaaagagatccacgccgcggacggtagctagttagtttcagtcaggggtagttcggtcagaaatagaaggagtagaatcaagaaattcaatacctagaggatagcgatcggcaacatcactaaggacttgttagagattctctttctctcaagaagggctacccgttgacatacattgcccaactcccttggccagttccgatgtccaagatattctatactccgtagttagcagggcgtttaagcgagggtctccgtataaattcaccttaggcgaagcgccgataggggagcggaacagaggatttggctgatcgtgatctagcacgagaaacatcaggtggctgaatttgttagtatcacatctctgaaaggtatggggacgggatgtggtttacccaatctcaaatgcctcaaattgctgctcgtcggaaggaccccttgatattgttactttatgtagaacaagatcgctgcatcgtaactaaccagtagtcatcttctttgatggcttggtatctgcataccgggttagtcttacaaagcatcttagactggaagtatactgaccttcggccgttttccagccgtccccttgcaatagcggacgctatggatgtagtatccctacatactggggtaagaactcgacttatatatatgatttgcagtgacactcacgactgaaggtcatgatgatccacgtcatagccagtggccatagagtagaaatcggggtcctaggtgagaggtgagaatgactatatcggattatgagattaccactcaccaccgcgatttggtccattttcttaaccattctctcgacacttttccaaatactgtggaagataaaaggaggaaaacgagggtggagtgtaaaagtgtcagcacgggaacaaactcccggggaatccacaaccgttaagctagcagggtgtgagccgaagccacagccctagagtatgaccgagttgggtctaggttgaggactcgcataaaaaaagtacgaggggaacggcaggatgctgttgatccatgtcagctggtccgtgtgggacctcataaagcggcaccccgggagccatgttcacttctgagtatgttgtacaggcagaacaacaagccctaaaccaacatcctcccacttggtattccacaaaacaaggctcatgagccaaattcaagctcattccataataggtggcctcaaagcttgcatctaccttatcacaaatcaggtaagatacgagcatacccctcttgggagcaacctcaagtagagatcttcgaaggataacccatgcaataagagaaattcaatggtcccttgagccgttttatgttgatagatgatatttcagtatataaatcaagtattgcctcggcatgagacgtgactacaagatatagcaatgtgagcgaaacagatagctagtatgtaggtatgcctttcatgtagcttcatataactcttgggatattcacggataggaacatttaagtctatcacagcttttaatactctttgtctatgtttggccctagcctccttgtcccattatctcaccatactggtttctttcttgacatctgcgtataagctgtatgctccaaagcagttgatatttccctcactaaatacctttacctcctacctcagactatactccagggctttcatcatgatttacgtaaataaaatgatatttgttcttgtgtggatggagcaaacagagtagcaacaaacaaggcttattcttcagctcacttttccttcattgtcactgtagtatatgacctggcttcattcactgtgctctatcaaaaacaggcttgctttaccattgcgcaaagcccatttcttcgtatactggactcccaacttcctagcatcgcactcaaccacaggttctctatatgataacaaaagtcatactagccagtctcatactacgcgacacgtcccagacttcccactacaatcaatcaatcgccctcacatagtgaggatacaaccagtaagcgcaaatagacattctacctcgaacagcactgacacgtaataaagctctctcaaagcagacgaacgtagagtctgtagcctcgcgtggcatccacacgagatacttcaaaatgtgtctattcatggagacccactacttcagttgcaagcatacgtgctttgagctctacctcttttgccgcgaggtcctctatcaactgaaccgtatcaacgaccggcaacagctcagagactacgatttgccatttgaccctgattgtcctacctgccagccatatacagtcaccatgagaccagtcacattcagtccggatgtgaattatcagagtgtgattttggagagcaatattgtgcatcggagggtggatttggtggcgagctgtcctaattgtcatacacaagcattgtgattccaatttatactttagccagaatatgggttcatgccgatagaaagtattgtggtgatgaagggatgtgcctattgaagataatttactgggcatctagaagccagaagagaagataacacccaaaataccaagcttatttctcgtaagactaatgttcgctgtacacgcgtgttcaagtaaatgcgagagctaaattgcatatatgtatatataatgatgatgatgatgaaaccccgaagtattgacagtgctgcccagtacagaaaattcacagaataggtaaatgccgagtggtgacaatcgtttagtggatagcaccacatccacaatcatcggcagatcgcttcctgaagtctccatggtaagtgtctagtccctcggcatggaaattcaagcccaggcgatcgcccatccagtcacttccagacttagtatcctgtagcaacttcgtgacgttgtcgacattgagatcaagataatcagcaaggaagtctcccacatcggtgttctcgttgttgccaaccaatggccaggcatccttggtagacgaagcgtagatgttgacgtcaacagctataacgaaattagcatactatcatagatcactgcttgagactatcttaccagaatgtccatgagtagtccagccaacctgagcgcgacggctgatcatgtccgcaaatacgtatgccgtagtgacttcggggtccgggtggagcaaggtattcacttcatcctttgaagcatcatcgatgccaagcccatccttgagagtttgccggatccaagactgtttactcaaatcctcggcgtcctttcctggcccagaaagatattccttcagttgagcggcaaggtattcgccggagtggtttgccttttccaggacattcggaagccacaaatactccgggtagctcttgtgcagctgtcgtgccgcggcaagaccaccagtctcgtggtcggaggtgctcacaatcacaccaggagtagagtcattctctaggaactcgagcgcggcagcaaatgccttgtcgtatgccagtacctcgtgaacctgggcggcaggatcattgccatggccggcgtgatcgatgcgagagccctcgatcatgataaagaacccttgctcgctgtcctcggtggccttgctcaaggccttcaaggcagtgcgagtcatctcctccaaagagggatagatatcattctgagtgcgtcgatcaatctcatacgggatatccccgctagcgaagagacctagcagcggtaaactgacattatcgccgcccttgaggctatcgaagccagcacgatcatcaatatagccaaatccattctgagaagcaaccttgaccaaatcatgatcatccgaacggcagctgccagcctgtgagttgggcaagaaatggcatcgcccaccgccaagcagaagatctaccacccgaccgagagggtgttcaccaacttcttgggcagcgatcagatcttcgtagttccgtaaattggcatgggcggcgaagcatgctggggtcgcatccgtcaggcgagtggtcacaaccagacctgtcttatagcccgccaacgcagcggcctccagcacagttccacaaggcgagtggtcgggaagcaccgagatagcagaattgtagctcttgcgaccgcatgaaaaagccgtcgctccagccgcagagtctgtcaccaagctagagcttgaccgtgttcgcgaagtcccaacgtagtgtttatccaagaccagaatgtcatcgaatggcagatcgtgcgtgtattgccggaagcttcgagtcagcgagagactggtaggtcccatgccatcagacaccatgaagatcatgttccgcttgcctgtcggcttgcctccagggccccaggtcgtgtttgacgcaagatggttgtgaggctcggctgacttgtgtgggtagatcgcggccagcacaatgaccaaaattgttgcaacaagggcccaggaaaatactccaatttcccgccaggaaggccaggctcgtcgtttgtcttgatgagtcgttcgctcgccggtcagaagagcgtagtcctcctcgtcatttcgaatcgatgagccatcggaggacaggcggggaggtaagagagactcttcccgcgccatagctgggatagagacagaattagagaagagtgaaaacagatgtgcgaggttgagagatttgattacggccttccaaggttgtgtcaagtggaccctgaaccccaggggcggaggtgaggagataaggctaagataacaaccctagaggtcgcgtgacatgtaactgtgtatggatgcaacgtactccgtataagaactacacctagcctttcgtaaaaccaagaatgaacggagaaaaattcttacattttgaaacaggctagttcatatacttgaacaatatttataatacatgtcattctcaagacaacctataacccctatactatagaggtctggccttccacccaataggaatcatggcagcagcaatctcagttacaccgcgctccgtcgcaagcagattgaactgtgcagccgcattccgggtatcgagaacatccacccgaatgcccagcgagttgatgtgacgtttagtttcgggcgagagtgggaacatggagccaccaagaccaaggatgagcatatctgtagtaaaatattagaaaattggagagtaatttggcagtcaagctcaggtatgtctcatccatggacgaaacgacatatctgagggaaacaaaaagcaagaagaaccaacataccaggctttggccagacaagacttagcaaaccccataccgactcatcaagctcaaactgccctttggagttgagcatggcatccttagcggcactgtcgctctctgcaccctggacagccttccatggccgccacgcaaatgcctcacctccaaccagcaacagcccatcgccgttggtaagcttgacgccattgttaagatggaacccagaatctaggcatgcatcaatagccgtcgttggcgcagggatgttgcccagcacgtttaacgcatcgaagttggtctgagtgtcttctttggactccgggccgcggtcgcgactgacgggtttgtgcgcgtgtgagcgaggaatcatgcgcgttggttggatgggtgaactatagttccgacgtcctgagggcaacccagtgttggaatttgagacgagacatggtgctgcggtcgctgatgggatctggcagaatcgagtcaagttcgaagtgcggcggctattggctagagaggtgcgtaagacgcgtaggagttgtggtgatggtgaaagcattgatgcgatatgtgggatagagcggctgtcgggttggttctgtatgatatagcttggtgatgtaactagtggctcggttggtgtcacgtgaagtaaaccttggaagctttctgtcggggtcttggctgagaaagctagcggccccggcctacatattgacacgcactaatgcgcctctacataagtttaatcatatcacgcactcatattgcaaggatgtagaaagaaaaacggttgggaattctatacaaaccgaaagtggctctgtgtggagtgagcatggactccatgatctcaacttgaagccctagtctatcagatagaaatgatgcacacaagcaactagttatgatccacgttaataattgaattcttcttatattaatattgagcctagcgattcatctattttgactttgcaggagtcccaaccccgaccctctgcgtctggattcatatggaacaaggacaagaggagagacgacaacatcgtacgcgtcgtaaacccaaaacgccaacagaaaaaaacagataacgagggggaaacgatacctggaagaacgaacgaactgaaaaacgacaaataatggaagaagagaaaagcagattatgtgtcacccctcgagatgagacatcaaacttgatgtcatgctgcctccgattgctactgcctctgaatacttttcttgtaaggatatgaagaaaaaaaagtatgcatatgtgaaaaacaagagccattcactgaccctattttagcggttcgggccttgctgattttgttgtttcagcgaccgaacaactttgcggtcttcatccgactgactagagctgctatcatcgcttgtggttgcagtgcggattcgctcggctagaacctgagcttctgccatagccttttgggcgcgaatctgtttacgccacatgctagcatagcgacccttcatagccaaaagctcttcatgggtgccgctttcagccacttgaccttctgacaagaccaagatacggtctgcggtagtgatggtgctgagacgatgagcgatcaccagcatggtgcgaccccgcgagagagtagcgagtgccctctgaatatgctcctcggtatctgtgtctagagctgcggttgcctcatctaaaagaatgatgcgcgggttcttgatgatggtgcgagcgatagccacacgttgcttctcgccaccgctaagccgtaggccacgctctccgaccttcgtgttatacccgtctgggaaagcaagaatcttgtcgtgaatactggcagcgcggcaagcctcgaaaacatcttcatcggtggcgtcctggttggcgtacttcaagttgtacatcaaagtctcgttgaaaagtacagtatcttgaggcaccacaccaatgttctggcgtagtgaatcgattgtgacatcctgtacatcatgtccgtcgatacagatacgtccattatcggagttgtagaatctgaacaagaggcggaagacggtggacttacctccgccagactcaccaaccaaggcggtggtagttcccggctggcagtggaaggtaaggccattcaacgcgggcttacgcgcatcgtaagcgaactcaacattctcgaatttgatgtcaccattgcatacggccaatggggtggcacttgggctatcgaccacagttggctgctcacggaacaattctagcagtcgttcggcattgatcaatgcagattgaatagaccgatagaatgtgccaaagaaattgagcgggccctggagttggaccatataggccagtagagacacgaacttgccgacagggcgctgaccactagcaacctggtatgcacaaatgaagcacattatcaacaagcccatcataaacacggtgttttgacaggtgttcagtagtgttagagagaatagcacgtggtattcggccttctggaagtcacgcacagcaccccggtaccggttgaattcgtactgttcggcattgaagtatttcactgtctcatacgagaccatggaatcgttcctagaagaagcataagttagtaccacatttgtctcgaatctataacaaaagcctccttccaacttacttgacagcatcttcttgtcgcgaggcattaaccatctgtcttctgatctctgctctccactgggccatgcgaatagtgacatagagatagccaaaagtagaaattccgacagctagggcatagtagacatcgaatgcgaccatgaagtacacaatcgcaatgacaaggtcgacaagcattggcacaacctgaaaggtgacctgctcaaggaaagtattgatcgaactgcccttactcagagcggacaggacttctccggtcttttttccgagatggaagtctaagctgagactatggacgtgttcgaatgcagcggtggagagctccatgtaagaatactggctcacgggaatccagaggctagagcgcagagagctgagtaggccctggccgccctgcaaccaccggtacaacacatacaggcaaatttgaagccatggcacatggaagtccccaccctcaccctcgctcttagtaagagaacctgtaatgagtccgatttggtagggtaccaggacgttaacgactctctggcatatgaggagtccaaaacaaaaggtgacaattagttgcagacggcgagatttggacggccacaggtatgggaaaaatagcgagtacccgctcaggtactcccaccagctagtggaagggacagtcgtcggacgcacccatggatcggtaggtttggaattttcggggcgaggagctccgttcgtcgagccatatgaatgaccattggcagttccgtttccatgtccgttcccattgccattttctgcaccaccggaatccaaaagtcccgtggcttccgtgactccattcgctccctggcttgccttcccgtggctcttcatgctgaacgattgacaggcgtagagaagaaccagtgcaaacaagataaggatgcgtacactgttcgatcccacttcgagggactcccataatgtaatgcttctgcggatccgaccaccttctgggtctccgacaattggctcgtggtgaaccgaggtgtagattgagagggaggtgctaacaataaccaattcgatcgggatggcgacagaccaacagacaaactgggcgatcgtaggcgagggggatgtgtctagcattgccatgagcagcactgcgtagacgaagaacgagccgacgacgtaaatctgtaataagtgtcaacggctgtcgagcagcaccaaaccatctgaatagaacgtaccacgaagggctgtcctcgccaccagttctccgacctggccgtcatcacatgtacgatatagatagttgcatccgcaaggaaggtcaaaagaatggccgcggagagcaagttgaaaactcgtttgacgttccgcgagaactcctgggatttgtaggcaggcacacttcgagttcgctgagggagtggtcgccctcccgggccaaagtattgagactcatgcttgctagctttcttcgcagcgatggtagtactagccacgaaggccacgacaaagaggataagaaggaaaattgggtaagaggtgcgcaagtattccagcagctcaagggctgcatgaggatccattgcccactaaatatcccggaaatgagtgttttaaacaaagtccatgacagactcctccctcgaaagaaaggtaagaaagggagattgccgggttcggatcggaaaggactggacgacgggtatggcgagagatcgacgcgaggaatgatggcggagaaacaacctcagcaggtttccacgtggaaagtttaggaaaaagaaacaagttgaattatgaagattccacagaagcaaacgtaagaaaagaaaggaaaaagatatacgaatgcttattcttcttttctcactaaatttcttattaaatttattttttttcctacttggcttttgcctccaggatttatttttacctagaaggaagggattggatgctttttaagccaacaagagcagtgctataactagaacaggaagaggcaaatatatggaaatattctccgtaaggcatgtatatatagacatgggtagaatggctgaatgacggtgtggattggatatgtatgtaggttgctgcagctaaaaaaataaaaatggggtcacgctgcaacttgccgttctctttaatatctatatcttctttctctgggttgtcctttagggttctgtctgtctctggtaatattggaaaatgtcctggtatgaattaaacaatctacagcccttcctgcccaatggttggtgttgaaattgtctcaaagtgaaaacagggggggtagagaaggatcgtcgatcgatcgagaacaatccgcgcagatgcccatgtgatgacttcactaagctgccaaggaacataaagcaacccgaatgtattattttgcctctcttggtgtcttttagtcacgtcgggtggccaaggggcgcagttcaatggccacggatcgtagtacccactgatttggtactcgtatatgatgtacgtaactagtttgtgaatatgtcatccctgaagatctatgaatagttatatatttccgatgtatgtgtctcgtgttccacttcctaactggttgaggcaaaacagaatgcttcccaggtcttatatacaactatatactatacagtattataggtcttttaatcttttaatctatagacatgttcccttgaagaaaataaattgtaagttcacattcgaatctgatccctctcatgtgttgtcttctagaccgcccttaacatatgttcaggcccgatggctttcaataggtaaggcttgaaaaatataatatacattgtgagaaaagtcacgtagtacaactaactgatgccctagcttcatgtgtaatgttataactatcgtccggtatgttgttaatggatagcagtaaggcatagatcggtgcctcagggatctctccctcaccgcttgcatttcgatgatcttcaactctccgcatctttttccctcgaattcggtgatcgcgttgccataatggagacctggctataaaccatgtcggacctctcaggttcgcaatctccgatccctcctcctccccctccgccacaaaagtactccaatcgcgccgccaatgcccttgcgagattcgcccaacctttcttctcgggctcaagaccacctagttcccaaagcagtcgcgcggatggtccccggtcgatcagatccaaatcactgtaagtgttgccgctctatcacaccgctctgacacccctgctcccgtgggttacttttccctcttttgcttttttttttacggatgtagtgaccaaccccaccattcggtcatcggagctagtgtgatcgggcaattgcatctgagccaatggaatcttcaagtttctaatatttgcttctgtaaagaccaggagaaccgcagactgtaacccacaagacaggcatcgcaatcacggctttggacatctcgcccgagcggacacatgcggttatcgcaggcaaggagattctcaaaactatccaggtctcgccagaccgctcgtcagaggaattcaatattcgcaatgccgtcattagctatgcatctacccaccacgacacgggtgtttcgatgccacacaaggatcaattgaatgtcaaggacgtaaaatggtcacatgggaaccatgaccggataatcgcaaccgcagtcgcgaatggtcggattgtcatttacgacctacatcggcccggcctgcaattgtgtcgtttccagggtcacaatcgccaagtgcataggcttgccttcaaccctcatcttccttcttggctgctgtccggtagtcaagatggcacaattcggatgtgggatctgcgatccgcctctgcaaatcgcggaagttcaacgtgcggcagcaaatatctgtatcagggcaacagcgatgccatccgagacgtccgatggtctcctaacgatggagtcatatttgcgactgcttcagatagcggcgcgatccagatgtgggattaccgaaaggccaatgctccactaatgaaaatcgctgctcatgatcgcccatgcttcgcagtcgactggcacccagatggaaagcacattgttagtggaggcacggatcgccaggtaaaggtctgggacttttctttatctgcagagcgacggcagaaaccggcattccaattccgaacgccacaggcggtcacaaatgtgcgatggagacctccctcttgggttggtgagtctgcttcaggacaatggcaatcttctcaagttgtcacgtcctacgacaaagaagacccacgcgttcacctctgggatctccgccgcccgcacattccattccgcgagttcgatcggtacgacacacccgcatcggatttgctctggcgctccaaggatcttttgtggacggttggcgaggccggggcgtttacccagaccgatgttcggtatgcgccaaccgtggccagtcgccgaccgatgtgctccgtagcctggagtcccactggcgaatttgttgcgttcagtcaacaacggcctaggcgacgtcctctaggagtcaaggccgctgaatttctacggctcgacgatgatgatgacagctctggcgagagatcactaagtcaaagccccgcagatgacatctttgatgaagccgttttggctacttcccttcgaaatcggcataacaaatcggcctcgattcgaccatccaattcctggggcagtactccgcccggcggagtagattacataccagtgctccctctagaacaagcactagccaaactcgccaccccaatgcctagccaggtcggaatcatcacaagtattccggatgtcacgaacgactcagccgtctttcggcatttggcaagccactatacgccgttgatggatgagcacagcgaacataaaacgcagaccgacgtcctgaactctttgattgagtcactggaccataacgcagaatgtgcagatgaggtgtccctggccagattggctcagacttggagaattattaaatacgccattcttgaagagctccaacgtagagctagagattatcccaaaggtggtctgaaagataggccatccaaggatgggggcttgatagaaaggtcacgacccgatgatggtcggcaggacagagtgaaaagtcggttgttcaaagccgtcatggagacggtccccgaggccgagagctcgtcaaatatgaccacaccccttgtgcgcccattgccagattccccgaaagactcgtggtcgagcactgattcccaaatgccctcgatgagcgatgcagtgatggaccttgaccctctcccgccatccgtcttgagtgatcataatagttgggcaatgtcagaccgtatacttggacgacaatcatcaaccgatgacgctcattcttctcaatatcgatgggatcctacacaagaagatttggacatagagcaacggtctgcgcctcgggcaattgccggcaaggcagattggcgccgtcgtccagacttctcccgcgaaaattccgaagatgactatgacctgaagctggaaaacaaacgtgcagcgattcgtgactacaagcaattccccaaaaaaccgttgaccctcgaatcaccattggaatttaatcggcctcctcgtcctgaccgttttagtcgacatgattcctcggagagttttcccatgttctctacatccaccgacagttcgcacccatccaagtctattggtgcatcgtactcgtctagtattgaggcatctaaatccctggatcctgggcaatcttccgcagcgctgagaagagggtcgatgctagcttccacacgcgaggaatctgaggatgagctcttcgaccagctcatctcagagactgaccgaattcatttggatcgcccatcaagcccactccctttgatcacagaatcaacgccccttgaaagacagcaacctttcccacgagacgataccctcaaccccggcaccacgccttattcaacagtgggcggtatctcgcgtgtcccaattccactcacgccagacggaacagacctgaaaccgtggggtattgaagcaattatgaaagaatcagttcgatattaccacagcagcagtagcttagttgatatccaaaccgcggcccatctcctccagaagatgcacgttctttttcgggactgcgaacaaattctcccatatgaagaatgcgaaatggtcttcaaaacttacaatgagcatctaattcggcactcgatggacctcgaggcagcagagctccgcttattttgtgtgccaacatatcctgccgtctacgaatacacccaggcagattcattcatcaacgtctactgctacacgtgtcagcgaccctttgaaaaccccacccaagataacagccgctgctatcgctgcaacacacctcaagcaccatgctctatttgtatgagccttgatccacccccagaatgggtttcagagcagcaaactccgccaatcgcttcatctaccctcacgagtcccgacctagacttcgaaaccacttcgaaccattcgtcacaatcctcagttgccactgaacccgtcccagcatcggaaatcgatattatggagcctttcaccgtaccgcgacccaaagggtccgccctttggacctggtgccaaggctgcggccacggcggccatgtagcttgcatcacaacctggctcgttgacatttcaaccagcgaaggtggctgtgccacagccggctgctcgcatgactgcgggcctggcccacgtcgcgaactgaaccgccaagacatgcaggcggaatccaagcgtcgcgactcggctagtcgctccgccggtgtcgggctcgtcaagcgtgatccctggagtaagggtgaaagtaaggccgtcgaaaaagtgcgcggcatgctgggtattgccggcattgctgctgccaccgggggcagtggtgctggcccgaacacttcgacgaacaatacttctccggcgccgggcgaaaccggcgccatgtcgcctaaaagggtgcgtcttgttaccccgattgagcaagataagggaagtgttgccccggatcgcatggatcctccttcaagggactgagcttgagtcttgcgtaacactctgtgtaccattagcgcggttttttttttcactttacgtcttcacttcttttttgtcttcttcttctatttgattccccaatcgcgatacttcaatgaaacaatacacggattcaagtacacgcgtatggcatacagtgtacagccctgaaatgcatttattcctagcacataatagataatgtgtcgtatgtactcatagcaaccttcgccggattgcttgaaaaggacttcaacacattcttcaaacataatatccccactctccttcgtctagaacctccgcttcttctttgcaggagcttttgccttggcctcgagcgacctcttcagttcctcgcgcttccggtcagcgcgttggtcttcagtctccggttctgcaggtggagctggagggatcttctcttttgctgatgtgggcaatggagactcctcctttttaagagcttgtcggtcagccttcggtttagcaggtgtagctttctcgggtgacatgaccaccgtgtcagatgtaggtagcggcgacttatttcgagcttcctcggcagctttggctttggctttgccgcctatcatgccaagtttcccgggacgtttagcttttgtcgttgctggtaccggtatcgacgatatcggaagagaaggatctctgctaatcctttcttcctgttctggtgactctgggggtccttgggattttggcgagtcgcgggcttgtgctggaggggaaggggctggtgaaagcgagggctctttcgcttgctttttcttgccgcctatcatgcctaatccgccctttggctttttcggtgtctctcgaacttgcgctggaggagaaggtgctggagagggagatggtgaggcccggcgctctggttctttcttgttcttgccgccaattttacccaacccaccttttggtactttcggtatctcctgaactcgcgctggagaagggactggagacggagatggcgagggcttgcgctctgtttctttcttgttcttaccaccaattttacccaatccaccctttgttactttctgcgcctctcgagcctttagctctggtgcggcgggccctcgcgaccttgaaacgctgggaatgtgtctttgacgaggtgctggctcagactcggattcggagtctgatgctgtggcttcgtcttcctctgaaggcaatactgacgggacaggacttttctctctgggcttttgcttgggtggtaatgcttcgcctttgccatgttgggatttgagtctaggaggagtttcttgtcgctagatgaacggagttaagctatacatgttattgtgattagggataactcgtagcatacctgaaactcatcgtcatcgctactcgctgttgagtctgctcctgtgtcgatgttcttgatttcaactggctttgttctatcttggtcgttggaaatttcctcttcgatgggagaggcctctctggcgctagtttcagggggtctcgcaagttgctgccaccattcgccttgtgactgagtgaaagtatctaaagcacgagaatcaccggattctgagatctcatggagtaaattggtagctagtcccgcccgatgtgataatcctctctcagcgagccaagtctcctcctcaaacggcgcgatacctttcacagatttagcagcatcagaacgcgtaatagccttgcgagacatgcgcgaccctgcagcgctaggaaacactgaccctagatccacgccaagtgtttccattttgtcaaataacttgccaagtacgtagtctttctgtttgatttggttcaagagcaaacgttggcgggactcccactccgcctcctctctcaacagcggaagtaatagagtattggtcaaggacgacaggggttcctttaataacttcaaagaccacttgagaggtttcaatggggagggcagcttggttgttgtcatgatttcaagggagttggtttgtgttccactgcttaagattgcgctttcattgccattttgcaaagcttctccaattgtttccaggagcacatcgagttgttcttggtcctctccaggatcgatcgttgtgacatcttcctccgctctcttggtgatagctttacggggtagccgctctgaccagatataggtgaggtctgttatgtggatctcatagccttgtcgggtccaggtgtactggaagagcaaaggaggtattccctgctgggacaagtgaagacgctgccatctggaaggcatggttgcatgtttggatgagttgttgatttaccaatgcggagttgtgaagttccaaagttgtctcatatagctgcctaggccataagggaaggtttgccgcccgctcgactttcccgctgatctcccgaactgctaacttcgtttccaacatccaaattacatgttcgggtcgcttacgcttggatcctcaatcctccttatatccttacagttcctacgatgtctgcgcgattcccaaaccgatccgactcaaagcgcagcaggtcgcgatccccgtcctcgtggggtcagccccagaaatatccccgtcgggacgacggagaatggcgcaaccaacaagactcggatcgcagatggaacaatgagagatcaggcccttcgcaacagcctcgcaacatgcgcgatcaagtaaggctcaacttgatccaggaagaccagcaagagcgtgaatgggtcgcgcaggaggatgtgttcgtgctcaagcaggccaaaaagaaagcagagattcgagtcaaggaaggacgcgcgaagcctattgactggctgacggtcaccctccgcattatcgatcctacgcgtgatcccttggatgacgagatagcagactccgatctggatgtcgtggacccggacggtgtgtttgagggactatcgcagacccaactacaggacttggagaaggatattgatacatttgttaaccttgagacaaacgcaaagaatcgtgaattctggcaggtaatttttatactttctgctatcgactgggccgtcctgctaaccaccgtcccccacagactatgaaagtcatctgtcgagatcgtcaaaagaccattacacccgagagtcgcgcattgaattcagtggctgctgacattaacaaactactgagcccaaagtcctacgagcaactccaaaacctcgaagtgcaagtgaaacgaaagttgaactcgaacgagccgatcgatacagattactgggaagagctgctacgcagtctggctgtgtggaaggctagggctagtctgaaaaatgtttatcaagctattattgatgagcgtgttcgcgacctgaggagacagcaaagacaggaagccgaatcaattcgggaaaaactagcacctcttgctccggttgtcacggcggatgatacaacaaatcctgatgagttcgagggcttggatccagatccaatgctccagattcgcccggaggacaaaggcttggaaaccatggacgagtccgtatttcttaaccaagtggtaggtttggggcttcagctcatgcatcccaatccacattctaattaaccgcacaggcccgcgaacgccagaaaattattcgtatgggtttcgtcccactacggcaccgagctgcagagaagtcctccgcgatagtgtcgaatccgacatctaccaatgcccccacgacctctgtatccacgcggttctcgtccatcccgaatgaggacttctcgcaagcgaccagagcgctatatgaaagggagctcgccaagggtgttagtgagaatgaggaaatatttacgggcgaagaggccgtgagcacaagctcacaatctcaatgggccggtaagcatcgcccccgaaagccgcggtacttcaaccgagtccaaatgggttacgaatggaacaaatacaatcaaactcattacgaccatgacaacccgccacccaaggttgtacaaggttacaaattcaacatattctaccccgacttgattgacaagaccaaagccccgacttaccggattgagcgtgagaacgggcgcaagcgtggcgagtcatcggccgaagcgggcgaggaagacagctgtcttattcgattcatggctggacctccgtacgaagaccttgcttttcgaattgtcgacaaagaatgggattatagtgccaaacgagagaggggtttcaagagtacatttgacaaggtatgctgtgttaccaaatgatcccccctgttcctcaactgacgtaatcctttcctttcagggaatccttcaacttcacttccagttcaaaagggtaagtcgattttttctctcttacggccattacgaagataatactaacagcttgtctcagatctattaccggaagtaatacatgcacgaccaacgatttccacatgggcgtcatatcgaaatggagagagtgggttatggtgtatgcagggagatattcggggggtgtattttccagtaacttgatacccagtgaatcaaattaaacctggattgattggactggaaacatttccccgccaacgttctcgcagaataagccggactttatatcggatatcagatgcttgatccaactgcttcctaaatttgatgaccctatcacctttcctttccacctctatgatcgtctttcagggggaagccaaaacattcctcgctcgccttgatcccgactgacgtattggcaccatatgtctattttctcttttatttttctgctaccggggtatttgcaacacgggggacgttggggatgtcctctgggtgacactatcccggcctgcaggagcaggatgtattcctcacttccggctggctagatgcaggctatgaaaaaaagaacaatttgatacaaaagtagaataccgcaccggtttgcagtcaacttctagaaggcccgggatgacgccggtgtaggtgaatgccctgcaggctcccatccgcctatttgaccctttgactatccccttctagctctaggaggcatattccattcgcactagtcgcatgtagcatgtaacatgtagtaccagatccagccactttaacttcctactcattggccattgtctgtactatgaatctccgttgcacgacttgggcatctaaggtctttttcagaatacagagtagagctcctataatacaagaaaaaataattccattagatccagatcgtctttttcttggagttaaatgcatctatgaggttatttgcagagaaaagaaagaataagatgtgttggtatgggatctttgaattatacagctccaaatcatctgaagttgaacacacacacatcctttgaggctgcactcttatttgttttcctccccttcccattcttattttcattccctcctcttcctcttcctcttcctctgtctccaagatttacgtttgccttctcatatcatctcccacacttccatgcttctcttgcatttcccttgctactcttctgtcatccaacccatcaagtcactctcgcaactggactttgtcttgcccaaacatggatttcacattccattcggatcacttcgacagagtgcagctttcagaccaagaagactccaaacctgatctcccgtcgcaagcacaagcgctatctcagggtactggcaatgccacgatgaatcaattcagcgtccctgactgggcgagatggagatcacagccagctcccatccctcctcgatattatcaaggttcgagctattcccgtgttgctgatggcgagccatacggcttaggcccgttgtctcaagacctcatcggggatccaaatggatatctcaattcataccgctcgcatgctacccccaccttgactggtacaccgtcggggttattcttccctcaggctggagagagccactcagattggccacgcctgcgacctcctcatgtcttcagagaccagccatacaactaccctcagttggaagctcaaccctttcaagactccccactgtcgccgtattccgatgcctcctatcattccccgcagtcgctcgctgcttcgagtccggcaatgacagctcagacagcagaccgtctctcaccacgttcaagctctggtgacaatagagaagagcgtcctggccaccctccgtattctgttctcatctaccaggccttgaaggatgccccgggaaacaagcttccactccaaagcatttactcttggtttgaagcgaacacggacaagggtggagaccccaacgcgaagggatggcagaacagtattcgccataatctctcgatgaacgcggtaagtctcattcttcataactcttactttcacttccctctttctttcacttccttgttgcaatatgtttgattgggcgtctgctatattcgatatcaatactaaccttaactctagggatttgaagccgtgaaggaagaagttggacctggtaagaaagccgtgaacttctggagactgacgccggaagcgatcaacagcggtggcatccaatcgactacccgataccgcaagctccaacaccaaaagaaaggtgtgagctcaagccaacgtgggcccgcacgtcagccatcggagtcgaagggagtccacaccacgaaggtggtcaagtcacgcaacaaagccagcgcccatggcgagcgcgctgaggcacatcctcaggaaatgaccagcacaaatcctagtctggggagtgaatatggtcccacgagccttccagcgatgcaaagatacatgcatcaccctatgggtcctgttgtcggatgcacccccatgacacctggcaacgatgcgctttttgttgataccgaggaggcagggccggcatttgacgcggggcataactatgactggtagctccagagtcgggcttccacgctcgaaggtcccggtcgaccatcggcgtgagaattgaatggaaaatggaaaaacaaaaaataaaaacaaaaaaaaggaggggaggggagcggaggtgtggtgggagggatggaacaagattcagcgaggagaacccgatggttatgttgggttccctttcgggtttggttgtttttgcgcttttttacttgggaatttcgtacactaggggcatggcgttatttgaggcgttgtttgaattcagaatgtgtttggcgggcgttccacagagcgagcatcatggcgaaggagatcgatctactgtttttcactttttcctcatgactacttttcttcttctgcttcttttctgtgcctcagtcattctggcatgagcaacgcatattttctcttcaagtgtaccataagttagtagtggtgtttgtgagttgaattcgtgggatctaccacgaaggcagagatggtatcgaccatcatttttctgtcatgttcatcaatggatcttctatgagacgctttggttgaagcatgcatatatctgtatttcctcgcttgtctcgagtcccacatgtctttagtttattacaaatgtgtgtcattggtatttttaggcatggacaatgccaaaaaaatagaaattagtatacctctactacccagtccctgggtttccgtacagtaaatattgaatcccccgggccaatatattggagttgttcttgtccgtagcggactacatgctgtactgctgacaatgcttcatatgcttgcacggtggtgtctcaagtgacaggaatagcgtcccaccatagataaatgagaacctgtgaataacactttgtttcttatatggtatattttcccgcccctctttgctagtctcctttagtctctattgacacttgggctctgtgcttaattagccacgctgagcaatcccaccaataccccgctataccactctgctggcttgggtagtaggtcagggtgctggggtgatgcagacatccttggcagcatcggctgcatcggttgctgcatgttgccttgctcatgatcatctttcctccctgtcattccccaatttccccaagaggacggagtccgacaccctcgtttttagctcatattttgtggggctaaagcttcttttttttttaccagagtgtgttcccaagtagatcaaccctaaggagatctcaggcaagatataggagctcaattgtagatatgtcatgtgttatagttagggcatattaacatactacttgcattatcattcccttctcaagtcactatcctccgcaaggacacttatctacaggtttcgtagcgcagtcgtagctcaggcacagccccattgttcaatctagatccgagaagaccacgttatatgtatcaaatcaagcccaacccgggttcatcctaaatcgattttgatctatcgaattatgtcggaaaggaacaggagaaaagttatatactctgcagatctcttaatttttaatatgtatggcatcaattgatacgggtacggaaatgtcacttgcgtatgtacttaatagccgacgggttgcccagcctgctggaatccgggatttgcagacatattccggtccgcatcaggtttaccatatagtttatgttgatagcctttgatagagcggttgtatttgaatatataatatgatgtaaccatttgtcttgtattctgacttgctattcttctgacagaacacgcacgaacctcgcccgttgggcgtttgcgggatggaacagcccagttcaatagctgtcaatcctgcaaacgctcgagcttcctttgataagcgccaaccctcggagtggctaattttacggagcaatgcgacacagaacaatcgcctgaccgcttcttgggccgatcccaattgtctgttgtcatccgtaaccctagcatcatagagtgaagattcttcagttctttgctttttcatagtaaagtaaaagagacattcggatcctggccggctactcattctattggctgcttcagaccaccgggaattgatcgaatcacagctgtcatgcactttacatatgcgttacgtacttggtagaacaatggaagtatagggatcgattccattggtacacctttagcgacttctttcactatatattgagctagacttggtggcatagagatactatatctcctttcgggggatatctattatatcgtcacacgctagcttatgatgtatgttgatggataaaatatgaaggaaaataccagatgaacctccagattccacgagagaaatccgtagttttgtcccggtcttgccaatcgtgcttccgtccaggctcttttcaacgatggaagcatccaagttctcgtttgtacagcaacactggcctgtggtatcaacctccccgcccataccacgacaatggagatctatcgcattctgtttcatcgtaatcctcaacagatggtgacaatttggcatccgcattttgtacctgatggatgtccaccaatcagatctcaaaaataaatccaggcgttcaagtaacacccacgctcggaccgagctcactgggtcttgctctagctgccacgaaggcatcatactatattttacttccgtttgaaccttaagttaagtaaccgtcctttttatgtagtacatgtacttgtaacgataaagctggcgataaactcggtgtatcttcaaccaatctcatatgcagcctcgaggaggtcaaggcacaaagaacctgcaagatgaagctcctgcctgaaagagtagttcaagatatcggtaatcaaggataattatgccactatatatgattttttcttcgattgattaagtgcaggaaaaccaaattgcttttcattgtatttcccgatatattcaggactagccaacatgacgttgcggataacacctcaaactagattagatgctctgtagtgaaggcctgagagcctggctggttttatttaaccctaaacctaacgcatgcctggtcgaggtctcaatttgctaaagagtcaaactccgcggacaaaaaaagacccccacaattgttgggacaacattttataatcgtctatactgtagtagtgggtagtagtaaggagacccttttatctttccgagattacgaggtgagttgcttagcgaagaatgccactgcttttcataacaagcatcgaatttgagtgaagccttgttgtcattggaagatcggtatgatagaaggaggtgcacgttcatgtccaatgaaggtgctttcgaactgggaatcctgttttaggtggttgcgagaacttttcggattccgtgattccgtgtctttagcacccaaaataggagcctctgagttgatttgagaaaaaagggaaaaagttggtatagacagcaaggatgttgcatgctcttctcttcatgctgcaaaaagggttgtggttttaaaagacagcctagaccaatacctcaagtttctactatatataaccacgatatatattcctacattattgatgcaacaggggctgtgatagccttcaatattagacaccatatagactcacagctgtgtcttgttcaattacatgaccacctactatgctgagtgagttgacctcttgggttcacaccataaaagcaaggcttaaagtaattgaccagaccatgtggggtcctaatccgaagaatgtatatgcaatggagggtactaatgcaactataaatgagatcaacaccgagatatacttcagccctggagaataggcaaattacacccggctacggtggccaacataaaggaaactattgttctaaccattcacgactacattatatccaagcctgagtgcctatgcctggtgcagatcaacagatgctgctggcctgaaagataatgcgcaaccttactcaaacgcgtcatcaagcttgacaccgaacaagcacgaaatgtacgaggcttccatgcgagaggcagattcaagacaccatggagataattttagacaacttgattcgacatgtcaggggatctctcatgaaggcaaatgaaattaattcatttgcttagccacgagccttttttttggactcgcatgctagctgttcctgttcatctttaatattttaagagaaccattcccagccgtttttcccataacgttcgctccaccgtaaaaggacaacaccgacaaaaagcacgcttagcgcttggcggccttctgctgggactccttgaggaccttcttgacgatcttctgctcctcaatcaggaaggcacgcacaatgcggtccttgacacagccagcgcagcgagagccaccgtaggcacggctgacattcttcttggggcgcgagatctgagagtactcgcggggacggagggcagggatctgtaagtaaaaaaaaaaattgtcagtcgatctgactccgaaattcagcgagacggttgtatggaaattgtagcgtttcggtcggccattcgttcgcatatccgtccatccagacagagttttttttttcaagtcgttcggttggcccacacgcgatcgcacatatcccacacaaccgttcaaaaatgcatcagggacgccgggggagtactcacaccggggagcttgatgccgcagtcaccgcacttgggagcagtacccttcttcttcaggtgaaggtaacggagctcgccgccgggggtcttgatgatgcgaaccttgttggaccgcgtgttgtacctattgaaagcaagaaaatccgtcaataacttgttcgaaaaggtgatagccatcccgatatgagaatcatcgtatagatcatggtggtgcgagggagtggccttggaaggaattttgaaacgtacgggttccggcggcgctgaaaatcgagttagatcaataattttccaatcggtattttctcatagaactcacgtattgcaatctgttgttggtcatcttgactgtacttgaactggtcaagggcggcagttgtcggagttgtcgtgaagcagaatgaaatatgtcgagatgggtttgtgtgggtttctgcttcaaccgacgctagcgcagatttggcgaggctgcgctagtcccgatgcggaatagtgccagtcggagccgccacttctcaaagttcgacggagaacaggagcagagatagtcacatcgcgtaggggatctggatctctatctttgtcgcgttttcatcttaatcttccatcccgccatcacctagctctttttctttcagttgtattcttcttttttactagctgaaaagtcttgctacacatgacctccaacttggcttgacgcgacttggaaccaacacaacctctacgagggagggttccatccatcaatcacgatcatggcctcattgcctccccctcctccacctccgggatggagtgcagctcctcctatgccgatggcgccgccgcccccgggctaccaaccaccagccgacccgaatgtcgcaaaatttgcgcagaagaaaaatgaatggctgcgcacgcaacgcaatcggttcggcgagaagcgcaaagcaggatttgtcgaaacacaaaaggctgatatgccaccggagcatctgcgaaagattgtacgagatattggcgatgtttctcagaagaaattcacaaacgagaagcggagttacctcggtgcgctcaagttcatgccacatgccgtcctcaagctgttggaaaatatgcccatgccttgggagtcagcaagagaagttaaggtgctttatcacgtcaacggatgcctgactctagtaaatgagacgccgcgtgtcatcgagcccgttttccacgcccaatgggcaacgatgtggatgtgcatgcgtcgggagaagagtgaccggagacacttcaagcggatgcgtttccccccatttgacgacgaggaaccacctctttcgtggtccgaaaatattgaagatgttgaaccgttggagcccattcagatggaactggatgaggtcgaagatgcggcagtttatgaatggttctacgaccaccgtcccctgcttgataccccccacgtgaatggaccgagttacaagaagtggaatttgtctcttccccagatggcgactctccatcggctcagtcatcagattctgagtgatgttgttgaccagaactactaccacatgttcgacttgaacagcttcttcacagctaaggccctcaacgtggccattcctggtggaccccgcttcgaacctttgtataaggatatcgatcctaatgacgaagatttcagcgagttcaacgccattgaccgtatcatcttccgtgccccgattcgaaccgagtaccgggtcaccttcccctttctctacaacaccctgcctcgaagcgtcaaggtcgcttggtactcccatccccaagtggtctacgttcgcaccgaggatccaaacctgccggctttctatttcgatcccgtcatcaacccgatctcctcccgctcggtcgcacctaaaaatatcaccgtcagccacgaagacgaaatatttgggcctggcaataatgaagacgacgaatttgagcttccgggtgacgttgagcccttctttaacgacgaagaactctacacatccgaaaccgcgtccgccatcgccctgtggtgggcccctcacccattcgataagagatctggcaagatggttcgtgcacaggatgtgccgttggtcaagcaatggtacttggagcactgtccacagggtcagccagtcaaagtccgagtctcgtaccagaagatgctgaagacctacgttctcaacgaattgcacaagggcacccccaaggcccagagtaagcagaatctcatgaagactctcaaaacgactaagttcttccagcaaacatcgatcgattgggttgaggccggtttgcaagtttgtcgccagggtttcaacatgctgaacctgctgattcaccgcaagaatttgacatatctccaccttgattacaacttcaatctaaagcctgtcaagacattgacaactaaggagcgtaagaagtctcgcttcggaaatgctttccacttgatgcgtgaaattctccggttgactaagctcatcgtcgatgcccaagtccaatatcgtctgggtaacatagacgccttccagctcgcagatggtattctttatgccttcaaccacgtgggccagcttaccggtatgtatcggtacaagtataagcttatgcaccagattcgttcctgcaaggatctgaagcatttgatttactaccgattcaactccggccccgttggtaagggccctggatgtggtttctgggcgcccgcttggcgagtctggcttttcttcatgcgtggcatcattcccctgcttgagcgctggcttggaaatctgctttcccgtcagtttgagggtcgtcacagcaagggtgttgccaagacagttaccaagcagcgtgtggaatctcatttcgatctcgagttgcgtgcctcggtcatggccgatcttatggacatgatgcctgagggtattaagcaaaacaaggtcaacgtggttttgcaacatctatcagaggcctggagatgttggaagagtaacattccttggaaggttcccggcttgcccgcaccaattgagaacatcattcttcgttacgtcaaaagcaaggccgactggtggatctctgtcgctcattacaaccgagagagaattcgccgcggtgccacagttgacaagactgtagcaaagaagaaccttggtcgactcacgcgtctctggctcaagtctgagcaagaacgtcagcacaactatttgaaggacggcccttacgtttcctctgaagaggcggttgcaatctacactaccatggttcattggttggagtctcgcaagttctccccaattcccttccccagtgtttcctataagcacgacaccaaaattctgattcttgcactcgagcggctgcgcgagtcgtactctgttaaaggaagactgaatcaaacccagcgagaggaattggctcttatcgaacaggcctatgattcccctggcacaaccttggcgagaattaagcgattccttctgacacagagagcgttcaaggaggtcaagattgacatgaacgataactacaacaacatcaatcctgtctacgatattgagcccatcgaaaagatcaccgacgcttatctggatcaatacctttggtaccaagcggagcagcgccatctcttccccgcttggatcaaaccttccgactctgaggttccccctttactcacatataagtggacacaaggcatcaacaatttgtccaatgtctgggagactgccgaaggcgagacgaacgtgatgatcgagactgagctgtctaaggtctatgagaagatcgatatcactctgctgaaccggctgctccgtttgatcatggatcacaatctggctgactacattacctcaaagaacaatgttcaactcagctacaaggatatgaatcacaccaatagctatggactgattcgcggtctacaattctcgggcttcgtgttccagtactacggcttgatgatcgacctgttgctccttggcttgcagcgagccagtgaaatggccggccctcccggaagtcccaacgatttcttgcaatttagagatcgtgccactgagacaaggcaccccatccgcctgtatacccgttacgttgataagatctgggtattcttccgattccaggctgacgactcccgtgacctgatccagcggttcttgaccgagaatcctgatcctaactttgagaacgtcatcggctacaagaataaaaagtgctggcctcgcgattgtcgcatgcgcttgatgcgtcacgatgtcaaccttggtcgtgctgttttctgggacatgaagaaccgcctcccaagatccatcaccaccattgactgggatgatacattcgctagcgtgtacagtaaagacaaccctaacttgctgttctcgatgaatggattcgaagtccgtattctccccaagatgcggaatatgaacgaggagttctcagtcaaggacagtgtctggtccctggttgataactctaccaaggaacggacggcacatgccttcctccaggtcaccgaagaggatgtccaaaagttcaataaccgtatccgacaaattctgatgtcctctggttcgaccacattcaccaagattgccaacaagtggaacactgctctaattgctcttttcacttactatcgcgaggctgctgtctcgactgtcaaccttctcgatactatcgtgaagtgtgaaacgaagattcagactcgagtcaagattggtctgaactctaagatgccgtctcgtttccccccggcggtcttctacacccctaaggagcttggaggtcttggtatgatctcaggatcccatatcctcatcccaaccagtgataagcgctggtctaagcagactgacactggtattactcacttccgagcgggtatgtctcatgacgaggaaacattgattccgaatatcttccgatacatcattccctgggaggccgagtttattgactctcagcgtgtttggatggaatactcgcagaagcgtatggaagcccagcagcagaaccgccgtctcacgttggaagatttagaggacagctgggatcgtggtcttccccgtattaacacgctcttccagaaggatcgaagcactctcagcttcgacaagggattccgactccgcgctgagttcaagcaataccagctgatgaagagcaatccgttctggtggactagccagcgacacgacggtaagctctggaacctcaatgcctaccgcactgatgttatccaagcattgggtggtgtcgaaacaattctcgagcacaccttgttcaaggcgacagctttcccatcctgggaaggtctgttctgggaaaaagcgtgtcttgccaagggaactcgtctcttgcgatacgacgggaccgagatcaatgtcgaggacgtgcgcgaaggtgaccaacttctgggccccgacagagagcctcgccgtgcattcaacatagtgaatggcatcgaccgcctgtaccgcgtcaaaatcggcggtgagaaagaagatctcgtggtgacgccgaatcatattctagtgctccatcgggagggagcctccaatggtcccaaaaagcaaaccgtggagatcactgctgccgagttcgctgcccttcctactgaggaaagaaatatgtacagtgcctttacatctcctagggttgagcagagcgccgaatcttcatctcctcaaattcacagtttcaagatcgagcacattagcctcgaatctgagaagacagagtgggctggtttccgagtcgacaaagatcagctttacctgcgccatgactaccttgttctgcacaacagtggtttcgaagaaagtatgaaattcaagaagctcaccaacgctcagcggtccggtttgaaccagattcccaaccgtcgattcactctctggtggtcgccgactatcaaccgcgccaacgtctacgtcggtttccaggtgcaacttgatttgactggtatcttcttacacggcaaaattcccaccctgaaaatttcgttgattcagattttccgtgcccatctgtggcagaagattcacgaatcggtggtcatggatttgtgtcaagtcctggatcaggaattggaacagcttggcatcgaggccgttcaaaaagagactattcacccacgtaaatcttacaagatgaacagctcttgtgcggatatcttgctcttcgcgaccaacaagtggaatgtcacccgaccttcgcttgtgttcgataccaaggacgtctacgagccgaccacgacaaacaagttctggatcgacgtgcagctcagatatggtgactacgattctcacgacattgaacgttacgtccgtgctaagtacctcgattacaccacggacagcatgagtatctatccttccgccactggattaatgattggtgttgatcttgcatacaacctcttctcggcttacgggcagtacttcccaggcctgaagactctggttcagcaagctatggctaaaatcatgaaagctaacccagctttgtatgtcttgcgtgagcgtatccgcaagggtctccagctgtatgcctcggagagcagtcaggagttcctcaattctcagaactactccgagctcttcagtccgcagattcagctctttatcgacgacactaacgtctatcgcgtcacgatccataagacatttgagggtaacttgacgacaaagcccattaacggtgcaatcttcattttcaaccctcgaactggacaattgttcctgaagattatccacaccagtgtctgggcaggccaaaagcgtctgggtcaattggccaagtggaagacagccgaagaagttgcagctctcattcggtctctccccgttgaagagcaaccgaagcagctcattgtcacccgcaagggtcttcttgaccctctcgaggtccatctgctcgatttccccaacatctctattcgtgcctctgagctccagctgcccttccaggccgccatgaaggttgagaaactagccgatatgattctccgtgccactgaacctcagatggtactcttcaacttgtatgatgagtggctcaagtctatctccccgtacactgccttttctcgactcattctcattcttcgggctcttcacgtcaatatcgacaaagccaagatcattcttcggcccgataagaccgttatcactcaagaacatcacatctggccatccctgtctgatgaggactggatcaaggtcgaagtgcaattgcgtgatctgatcttgaatgactatggcaagaagaacaatgtcaacgtgcagagcttgaccagtagcgaagttcgtgatattatcctgggtatggagattagtgcgccttctctgcagcgacagcaggcagcggagatcgagaagcagcaagaagagcagaagcagctcactgctgtgactaccaagacccagaacgctcgtggtgaggacattatcgtcaccactacatctcagtacgaacagcaatcatttgcatctaagacagagtggcgtactcgtgcaattgcgacctccaatctccggacgaggtccaacaacatctatgtctcctctgatgacatccgggacgatggctacacctacatcatgcccaagaacgtcctcaagcgattcatcaccatcgctgatctccgagtgcaggtcacgggctacatctacggtagctcccccccagacaatgaccaggtcaaggaggtccgcaccattgtcatgattccacaagtgggtaacacccgagacgtccagctgccacaccagttgccgcagcacgactatctccaaaatctagagccgctcggtattatccatacggtttctggcaatgagccgccgtacatgtctgcggcagatgtcacacatcacgcacgtctcatgaacgcccatccttcgtgggataagaggaccgtgaccatgactgtttcttttactcctggatccgtttcacttgccgcctggggtctcactccggcgggctacaagtggggcgcagagaacaaggacacaacctcggatcagccacaaggcttctccaccaacatgggtgagaagtgtcagctgcttctcagtgacaagatccgcggctatttccttgtgcccgaggataacgtctggaactatagctttatgggcagctcttttggtagcgtggagaagagacctatctacgtcaagattgatacccctcttaagttctacgatgaccaacaccgtcccctgcacttccagaacttcgccgagctcgaggacatctgggttgaccgggctgacaactttgcgtaaacatgcgcagctgatcaggtgcaaaatccttttttctttttctaagcgtcgtcttttttcccctttggttccatttctttttgttcatttgtgttcttgtatcacgacaaccataattcatgtattgcagcgaaaacctaggaaaaaggccagtggatttttttgtacagtacgagttttcttttgcgaatacattttctgttcacttcaacctttatttctttttattccctagtaagtccctcctcctcccctgtaagtatacgaggatgcagttggcttcggaatgcggcactagcttacatcgccactttccctatgaagattgccgcgacgtatgtgatggcctaagcaggcgcccaatagaactatgtagtctgtacaattattgaaatcaatgtgcctaaaccctccgctttgatacatcggacctttctgttgacagatgacagcatgcagctagcacaattcggcagtccttccgaatcacatctccggatctaccagacaaatccaacggggaaagaagggcgcgaaagagagtgtatcagagtctggctgaaaagtcgatgtgaccaatttaacgatcatctcctccaataatctcttttgctgattgtgatattgtctttcttccctttccaacgttatagaactctgctgtcaagtccaaacgccaatattgttttcgggtatctgtttcatccccctgtcctctttgttctgttctattggacatctgtgattgactcccgcaggcctcagctccgaagaaacccggtgcaatagaatagcttgccatcgcttactcgactagcctataccgtatcaatcggccgatgtgatttgtccgcatcttttccaggacggcgtagctacgtggaatatcgatccgacgaataagctgatgtctgatttgctatgtccccgagcgaagtctgacaggcttcacctgtctgccgtgtctttttcttttgtcacggctcttgactcttgaccctagactaccctggtcccatattttgcgttgggttttgatccccattaataggcgctttgccaacaatagttttggggaggttctaccgcgtcgaaggttttttttgaacccctcctcttgatgttgggcgtctgtgcgaaacccaagagagagaaacactaccccatggccggaaagatgggatacaactgcgtatcccgagagaacttgactatggtgatttagagtcctcttgcagtccagtccactggagactgatggaatcagcccggcagcgcacgctccaacttggtcaccggcacacggttggatttcccccagaggactctccaggatgttgttatagataggtccttctcttcgtttttcgttcgctcttaatctaagaaaaaaatatttgttgttttacctaactatacattgtttatgaccgattcttctgcaaaacctgcctacaatttgacccaaagtaatcctatccatcctcttctgcatgtcaacgcgttgaggcctttctcgtctttgttgtggttatatacaggcaagtttctcttggcatcgtcctcctatgcaacagcagaggcttttcttttctttgcctttctagtcgaaagagagactcgggaataaaaacgccctgggatcgttcatctcccaactgctactcaaggcatttgctggggctgcaggtcctggtgttgtttttatgtctacagcaccagcggacccttaccgaggcttcatggttaactacactcctcatgacagtggcaaagatgcgaacggggaggatatcgtttcttacggcgcggcgcagttgctccaagataggcccgatggcattcgctaccactctgatacaacccagacgccctttgggtctccgtcgacttttatcacgaaccactcgcccgcacgccagccggtttcacattacaacacacatgggtatagactctccccaattcagggtagcagaaaacgacaacgtaccgacaatgagcccgaggcaagagaagacagtgatcaaaattatggttaccgacctgtcttgcaaaatctacccatgggtgatccatcggctcctgcaggtgaatcggccgacctgacgtacgctggtcatgccgttccttcatcttcccgccagacatcgaaccaggactacctccagtcctctttcccgcaacagcatcatcaccataggctaccaccccaagcatcggtggctacagcctctgctggccagggctctgaacagccgccactcgaccgcagcttcatgaaccttccaggtttgccggcaccataccctgagccaaaagcgccaaagaccagattcggtcacagggaagatgagatgttgatagccctgaaggagcactggaagttttcctggaggcagattgaatgcttctttccagggcgaaaacagcaaacattgcaagtccgttactgtaccaaattgaaggaaagggctgtggtttgggatgatgctttggtatgtttgcgccccacccaactaaaagaccggaattgcgctaagtcctaggacaggatcggaaactgaaaaaggcgctggaggactatgaggacaacaaatgggcactcatttcccggaagcttggacctggtataccaccagcggcgtgtaagctgagggccgaagagcttgagtgatgttggagtgtatgttttgttagtttagagggacttgtttattatactgtgactcgataatgcgtgttggcgtaagtgattgttttccaatatatcatgccaccccgtgccctacacagagaagccctaggtattccgaaacggatattctgccgctcgtagattgacctcgcaggccgccgtagagagctcctgccaatcagaagggctgactcatcatcagtcgcgctcctattggatgtcccggccagccaatcacaggcggtcggaccaaagcggcttcaaactcgcccaacctcaaacctccaaactccctctcctgccccaaacgccccgcgtcattcacaccattacctccaggacaatgttcctccaacgtacagcctccgccctcgccaggcgctcgcctgcccgcgcttttaccctcgcccagcggcccttctcttcctctgtcattcgctgtacgtgactcctcagatggcctgatccgaccttcgcacaactgctccaatcccgcgcaccccgaccacaaggggcgatgctcagtcaattggtctgaatcttctattatgaccaccagctaacgtgaaactttaatagccagcgacaagaagtgggctcccaagcaggagggcaagatcttgaccttcgatggttagtgctttacccgaccccatgccagtcaattacttttcttccggcctgtgcggctcgacaaggatccatatagtcacgcactcgagaatatgcgtgcaattggacgctatagaacttcgggtgctggtcatgcggatacttttcccgagccacgggccaggcttgtcattctacctcgagtggataactacaaaaaatctccaaaaaccacaatgctgacctatcttctcgatatatagagatcaagaccgaggatgacctctttgccccgggtgccaagcccggtaccattcccaccgatctcgagcaggccaccggtcttgagcgtctggaactcatcggaaagatgcagggaattgacatcttcgacatgcgtccccttgatgcctcccgcaagggtatgactccttaatatctcaagtttccatcgcaattcccgaatgaatgatcaaataccgggggaattgcgtgatcattacttcggggcgaagaccgagacattggctaacaaaatgcgtcgatttattcaggtacaatcgaagaccccatcatcgtcaacagcgccggtgatgagcagtacgccggttgcaccggttaccctgtagactcccaccaggtcaactggctgactgtatgaccgccccatccaagcccaaccgggctaatatctccagctctagatactgactatgcgtcttttaggtctctcgcgatcgtcccatcgagcgctgccgcgagtgcggtaacgtggtcaagatgaactacgtcggacccgaggaggacccccactcccgtatgtttcctgctctcttttttgcttatagtatatgataatctgttggttgtgctaacattatcaccctcagacgacgaccacggtcaccaccaccaccccgctcacgtcgagcccaagaccttcgccgactacgtcaagcctgactactggtaccggtaaatcttcagtgccgattttctttggatgttgcttggaaatcccaatacagtgtgaacattatgctgcgtgtctgtctttgttctgtctccgtgactcctacgtctcttttgtactatagtgctttagtagatggaatgtgagtgttggtgaggtttttacttttgacctatatctatttgggttcgtagttactatgatatgggatatcaccggtcgtgctgttagtaggacttcttcgataccggtgtagatgaaaagagagaaaaaaaatgtatttttgagtctatccatatatcacttttgatccaatgtacatgtatgtatctagaaaaatgcggtggtatatgtgaagcctcaacagggaggtaaatatgcaatgctcgtccactcatatgcttagacatgacatcattcatatatcatcagccaatgttcagcgacccacgaaacgaagttcgatgaatctgagaggagggtaaacaagcgcagtccaacagaacccgacgtaaattcccatctagagagtaattagttaggaacaaatacacacatgatgggagatgggatttaactcacatcagcaccgtattcgccgaccaatttggcaatgggtccaatgtaccacagctgcgccatacacaatacggcgcccacccagccaacgataaaggcagtgaaagccgcaatgccaatgggtagctttgacggatcccgccagatgccccagttgtacccagtacggaggcggaagatgaaccgttcctcgaggacaatagcaatccaaatgacaacccagtagcccatcaaagcgaggaaattggtgaagatctcagagaggttgctgcggccaacgagcgcgcagacagtatagataatgacggcaatggtattccagatgacgcgcggtacggcctcggcgtagcgaccgaggatctggaagtcgatgccggcggagtaagtgggcgcgacggtattagcgatcaggcctagggcgcagataaccgagcagaatttgccgaagccgtgcagcgggccgaatccttcgacgattagtgctccttggcctttctcataggcggcggaatactctgggaacgtgggtatgcctgaggctaacccgacgccgcagactagggccatcgtgaaggagacaagaaggcctgccaggcatagactgaatatcttcagccgagaggtgttttcggggtagtagacgaagaagtcggctgctagtggggcataggtgattgcggcactcagacagatggagaagaaggatagcctaggaccatgttagaaaaccgggcttcgattcttagttgtaagaagcagactcacctattgccagctactgtccgggaatcgccaatagaggtggttgacaagtcaaacttcacggatgacaccccgaaaaggatgcaaaccacaattacttggggcaaaaatgcgaatctaatgaggcccgtcagtgacattgttcctcatggcaataatctctcaagactaaccgttcatagtagtgaaaaacttggatgccgaatgtggcaacagcccagctgataaccgcaatgatcacgatgcctataatatcaagattagtatcactattgatgtatgaagttttcggaatacccaccgacagccacggacatgccaccaggggagacagcagacaatatttgtccgccaacgacgcaatcaatcaagccgtatccaatcatctgaataaggttcaatagaacaatgatcttgctaggccaccagcccatcgaataccttccgaatgcctagtcaccgattagccctctcgatcaaataatagtccaacggattcaatatgtgctacgcaccaatgttcggatcccggaaacgggcccccatgtggccatccaagacgagacgatggaaccaactagagagccaaagacagcacaaagtgccgagtctaggaagttgagaccatagactgcaggccctaacatcccgagggtgatgttattgggtgcaaggttaatggagatccaaagcaagaagatttgcagatacgacatccacgtgttgcgcttcatgcgctcatccacggcaactcgttcgataccacgcgcttctaaattatactcgacgagctggttctcaaaagctctaataatggagcccaatcgtgatccaacgggattgcggcgattggtcgtcgtctcggggtaaagtgcctcatcgttgttgaccacgccgggactttcaggcgcgaatttcgtcaggtcttccttgttggagtgcaccgctaaggtggtgatttcatttcctgaagccatgctgcgattctgttagtatcacacctatttcctgaagagaggaaaagcgcattgagtcctttcgctggaattacccagatcaagtttaaccgtatattctcagaacgacgatagtcgaacaccggtcttcatgcaggatgcttgtcctagataccttgatcgtgagagattgccacactactcgtcttcatgatagccgtcctttgtggcacaggttgtgttaccttccgagagaagaggcactatgaccaacgtcagcggacttgatcaggcaatcacacaggcatatttcacctttgaaagcagaggatattcaaatccaaaacaaagtgagcagcaggtaatagcaggtaatcaattgatatgacaagcacccgatttccagggggggcaaaatggagaaagatttgattgccgcggggaaagaaatgagatagcccgctttggctttttccgccaccaccttacctgacatactacatccatagttattgtactagttacaacacacaagccattgggtttctgatttctgcttctgcaatttcctcggactgggaccagtgggaatcatatggtattgatggacacaaagcgcaaaaaaaaagcagcgctgtcaaaaccaaagcagacaacgcctgggagggggaagggaaacatgacggatcgcaaaacaaaatgcgcaggtgttcatatagcgcatataaaagaaattcgagaataatattgaaaaatattccagatcaccaactccatctgccttgtaaaatcagtggcctccagcggccaccgatgaaacttgcatcgctctggaattgcagggaatccggaggagagaatgccaaattcataaaagatgctaagaaaaacaatatcatcacttcgtcagaggcatcgtggtagtcagacgttcttgaaatgctctttggcatactgttcgcaagcctgtcggagaatatcgagattagatgcgatgcacaatgacatgcaggagattccggtgcttactttggcaggcttgcccactttctggccgatcaccttccacttgttcgcctcgtactccttgatcgcctcccgaagcttcacagactgtgcgacgtcaggaacggatgcgacaacggacattaaaaggactcgggatcatacctcatcttcggcaaattccgcgtagtgcatgtcctgcgcaaggtgtcagtaagacgagacgtggtattacccaaatcgcttaatattgcgtaccttataccaatgcttcttgacactgccctcggttcgggtcgggaaagtctgcgacgggtaagaaaaaaaaggcccaggtcagcaacccatagtttcagcctataaaaagccgcgcgcgcaccttggcaatttcactccaactgcgcccggcgtcgcgcattgtcttcagcctttgctcctcctctgcggtccatggggtattggtgcgtcccttcttcttaggcgtagactcaaccgtgggaatggcaccggagtcatcaatcacaccacccgaagggttcccttggcctgtcatcatggctgacgatcccgtgggagaaggaggacgtttgcgcgaagcgccggggttttgttgggatagagaagcagtcggaatcgggatgccttcaaaggttgggacgcggtggaatggatggatctgttgttgcgaaagcatatgcgggggggcgctggttgttgacgtcttgaggcgtttagatgtcgggggggaactaatcgggcaacaagttaatgaatagtagaaacataagatgaggtaaggcaatataataagaacgcgaccaagtgcacttgagttccaacccagtctccctcctacagctggaggccggacggagatcacagacgaagggacttacgacatggtgaaagacacacgcggttttcaatcaccctgtgccgattcatctgtacatacaaaaaaggccgcgtagagggaggggtggttagcaggatctggtactggcgcgccttggtcaactcggaagcgttacactagagacgatgacacaggcgcatcccaggcagaaccagattgacaaaggtaacagggacaatatgaataagtcgcgacacggataagtccagactccgaccggagtgatttaactcctatgtgggttggcagtcaaagggaagggctcacaggtcaaaatcgcatggtcgaagcgtcgattcggggacctcgaattcttccgaatatggggagaacatgaggctgggtgatggggttgactttgaagggaaggcaaggttaaggataggaaccaggaaaaaaagtagagactttaaaaacaccaggaagggagaacgagatagagtgcaagagagtgcgaaagagagagagacaaggttacagagaagagaaaggaggaagaggagaagttgttgtgaggaaaggcagagcggggatggagtcacctcatatcacaacaaccaaagtaataatagcactgaagatatcattcgagacggttgatacacttgatagagtcgatatggattctatagattatctagctcgtctattttatatggattctcgagtttctattgcttcgaggcgttaaatgcgtcgaatgttttggtttctttcatcttataaccaggccctctaactatttccctactatgtgacccctctattattctctatacctccgtctttcttagaataccccctttatattcatcttttactcccccaatatctaacgtagattattcatgtcaaattaaaattcagtgctgattcaaatgcgcctccaaccactccccctccggtgcattccacaacccgttcttctctggcctaggaaccgatgcgcggacaggggccctgtcgcaatttatgcctcgtcctgtgatccaattcgaccgacatcaagatgcagaagcaaagataactacgtccggcaacttccatgagacatttgggccgaagaaacccgcgagtggcctgttctagaatccggtgacccggcgagatctcacaacaccgtgcgaggatgacaggacacgcccaatgcgagtcaacgatgcgcccgagggcctaattattgcaaaggcatccagtggccccgggaatcatcccgcaatcatcatcgttcaattgacagaagtagaagtctccgtccaacccgagacttggcgggctagatcagccacaggacggtttcgtgtgaagccaccggggcacttcccctctctgccccccgtgccattcgttgatgatagaatatgcggtatggggtagagagtctggaggaccctatcagcatttatcttttgttttagcacggggttcatcaaaggcctgtatatattcaagaagcccagcctcttagaatccagctggcatttcctttttgtcacacacacagttcatccccttgttagtctccaattggtggcaattgacaagattgctagtgttcattcaagccgactaggactacagaatttcctggcattgtttgactcggagatatcaaatggtaatgatcgaatatatccggttaggtttgaagatgatgcatgcaaaggatcaggtgtgcttaatgtttcctggtgcggtatatcaatgcaacaagatactgccaagagtcgctggggttaaatatgacttgcatcaccccgttttaatcaatagaaaaggccgccttatcgaatctaggaatatcaagcccctagatcaacacaacgaaaaaagatacatattctatgcgtttcaacggatggctccaatattcgtgaatataggctaaaacaacaaaggcttctatcaatatgaccaattccttgctcattcacccggccgactgtttcgaccgttctgcgatgatgtaggatccttccggtcaggccaagcctcattcaaaatcagtaatcattacttctgggaatattggcaaggctaatcatgactattgggtaggtattcacgttacagcgattatatctgctttgggaatcccaccgcgtcacctgcatcacctagggcatctaggccttctcgaatccactacggtcataagcgcaaataaatagatcttggtcttgactagaatgtcggattatcggtatcactctagaagcttaagaagaacctcgaatcaaggtttgataactcaaaaatttatctcctaagcttatatatttgctcctaaacatccccgcatctttccttgttccagttcatctcctcagaagtgtttgagaacccctggactatggcttgctaagagcatgatcaatcacagtatgtttggcccttcaattcgattgtcaaattgtttactccgtatgtttcatatactaacttcacatgttgtcagtaccccaaatatgtacatcgagatcgcaatgttgaacagcacatgtcaaccataactggaggctaggcaaccaggtagaaaccccgagaatgccaactcttcctttgtctcataaatcaattcaccatatttctcgccgtctaactagttgaccagctactcgcgatttacgtgctgacgtcaacctcacgtgagaggacacgcggcccgagctcatgtggattgcggataacgaactcccccagtcactctaacagcgccatataccttcactcattgtatcttcctggacgttaatcccattttagggaacgtatatacgcagaaaacaagtactttattgcccaatctactcgagatttcttttttatcccattcctccagatacctggcgccgacctcaatggtgatagcttgacaagtgtccacacctccaactcattgtttgattgtccgatcacaactctccagccatggtgacctggaatgtctttcggattattgcagatttgtcccatgcaggctcaatatttatcctgctctgggctattcacaggaataagagcgccgagggttcgtatacctttgtataaaccgattacctaggtaccatgcagagcttactgaccaattcgatttaggcatctcactcctcacgcagttgctttacggcctcgtcttcatatttcgctatcttgatctactttttccatccacatacacgggaggcacgtggcacagcatctggaatgtctgcttcaagctcttttacctcatctcgtcctcatacctggtcttcctgatgatgaaggtgtacccacggacaagagaaagggagcgagcttggaagctcgctttgtggtctgtggtagggtcccttgttttggcccctatctccatctggctcttcgacaggtccgacagcaactcttctggttactggtttcttgaggtaagttgaacaagccggaagtgttcatatggtacagcttaactgatccaatcacttagttttgctgggctttctctatcattctggagtctgtgtgtgttttgccgcagctccttctccttcgccagaccactgtcccgacggtgatcgactcgtactacctgcttgctctgggctcctaccgagcattctacatcctaaattggatcgtccgcctttccaataaggagcccttttatgattggatcgcggtcgtatttagcattgtacagactgccttttatgtcgactttgcgtgggtgtactattcgcgccagcgagtcaagcttcgcaatggcggtgtcatcgactccgaggactatgggaacagttggctggtgaatcgtgtactgaatttccgggcctcgcgagcctctacagacgaagaacagcaccttcaagacgaggaggaaggggcggatggtcaatctaaccacaaccggtggggtgctcgtggtatttccatcgcagctgacgacactctggaaagcactagtcacaataaggcacatcgtgacagtttagatgggttttcgggagacgaggacgaaactgatgaccaccgagtgaacagttctcgctgattgatgatattctacggcaaattcggtcacagcatggcatatctacatgtcagtcaggttggtcattagatgttgcgcagggtgggctctaaacgtgttgactgcacaggaagacccgctcctaccgttctagtctggttatatccgggatttcatacccaccgtttgattatcgggcctttttttatggtagaatcaggaaatgagaaaatctacggagcaacggaatgttccgcattctggccccaagtccatggggaccttttttgctcaggctacaccgtttcacgctgctacccggggatcatttgatgtctgatgtgactagtagtccgctatggattgaatctcctttattctccaactacgctgtagtcagtagatatttactgtctcgattcgctccaatacacgggaaccggccgctacaccggtagtcacgtaccggggttaaccctgccgagaatattactgggatatcgtgcgtattccagcacccaaaggagcattgggccgcaacaaagtacatatgcatgcaccctgaaagatagctatcacatacgatgatatcgtaggaacatcaaaagtccccccaaagggcgcaaatgagaatagaccccagagctgacttgggggccaaatgcacttcccttgcaaaacgaaccagaagaaacatcccagtcctccaaagttggtttgtcactgtccaagattggtgggaatccatcaactcccaagatgcaatgtgataagaagatagatccaaaagaaatgagcgtattattcgaggtctagaaacgcctggctttttctcgggcggttagcagcaggacgtggcttggagagctgactccggaatcaaacgatcaccgcagatgtggagattggagattgagaaaaagcaaataaaataaaataaatcaatagcatcataatgaaagttccaggttgtcatgcattctcgcaatgagccgggtgtctgcatgagcgcttaagccgtggtcgtggattccccgtggaccgagtcaccaagcggctcgtggggttccatcagcctcagaaggacttcgggtcatccgtggccagtcgcgaaccgccggtcattgaacaacgcctctgcatgggaaatggagaatgcatggagattttatggagaatgtactttgtaaagggatcgtgatccctccatcttcccaataaccggtgtgttggaatctagtagcgtctagatgaggggggttttttttgcttcttcctttcttcccgtggggcctgccagattaaacaatattagagtagatgacatgacctgtgtcgaacatccttatgaagaggagcagttgcgcattcatgtctaactagaactaattgcaagatccggccatgttacaatacgctatgatatgctatggtatgctacaacatcctacaatatgctacaagataatataacatacaactattatattataatgctgactctatggtcattatagtttttgatgggtccaaaattcatgcactggacctctccagatctctaagcgctacgctttggctccttggaagatcatccacaaccctaagcaacacgtttttttgtttttttttcttgcctgctttttggcttttttgcatcttccttctggcccgttgcagtgggcctgggctcatagagtcaccttaatccctattcgcaatgcagagtctgatccccgggatggatatcagcattgaactaatgagcccgcagcgctaagacataggctctcgtcgagttttcatgagtttcccacgttctaatgcagctcagggctcaccggcggtagcgatctctgttttggtgcgctctgagcctatgattaattccgcgactcattgttcacatcttacctcacgaggcatcccggtgctggctgtgatatctccccaaagtggaggtatgggcggaattgtgcatcttctttgcttttcaatcttcccctcttttcttgctcgcatgaatcttataagatcaactgctttcggtggttgggaagttggattttctcttcatcattcagagcgaaaggcctcgttgatatacaccaacaatcccaaagcttcaaccatagtctgtcagccacctgcagtcccacatattcccctgcctcgagtttcatacttcgtttcacattctgctgcttcggcgtttattctccccactcagacaacgttgtcgaccgtgaatcaccccgtgttttatattccacttttccacctgagtcatgtcgaaccgctcggatatccccttcgttgaacaaatgggagagtactacgaaggaatgccagccgattggcctatgatgccagcggtatgtacctatgcacctctaagacaggacattgtatgcttctgcgacatgagctaaccccgtttacgatctagaccccgtacgtgggatgctacagccctgacttcgccgagcccctagccgaacccggcatgctgatgccactgggtgttctggggagctcgttccaccccggcccagaattcggttaccactctcagggctactacgcagatgcgcaccagcacatcatcaacgaccccctctctgccacagtgggtcttggtatctctgcgcccttcccagataatttcccccggtctttagcccccagtcccgacgtgtacgctccgggcccaagtggtgtccagcatggtgtgacagaggcgcctagccagtcgccacagggctccccacagggctccccagccaagcgtgccagacatcaatcctcggacacgtcctcgagcgagcagccgagcaatgccccaatcaacattgctcctaatccagagggtgttcgccgaatggagcaagaccgccagaatgtccagccctcttcccacgtactccctaagccccgggctccaggccgtggacggcgcgacccccgagcagagtatgaagacgcatttgtcgaagatctgcgagacaaaaagaaggcctggaaggtcgtgcgtctggaattcgaggagaagttccagaaagaagcctccgagtcacgcctgcagatgcgtcttcatcgccgctaccgcgagcgaaaggtgcgctgggcgacttccgatgtgagtgcgtaacccctcgcaacacatggtttaagcaatatgtgtgggctggaatgtacatgtgttggacaacccgtgctgatacgcaagtctactagatcgaacttttgctcgacgcccataggaactgggcaaatgacaaatttcagtatctttcagacaaggtgagatttcccatgtccatgttctatagagagttctaacatgtcttttcttcttctttagatgaaagagcttggtggtactaggtggtattcagctgatcagtgcagaaatcaacttcgacttatagaggcgaaagaacagcatgatcgcgggagtgaatcgccctctgttatgtctgaacctactcctgtgacacccgcacctgtggcacctgcacctactgtgtctcggaaacgacgtcgggcttcagactcttagcttcgagagccgttcgttgttttttatttcatttttcccttatttcatttctttctcttcttcacattctttccagcttgacttttttcttttctctttcagtcgcctctttctttatttccttttcattctaggatcaatctgatcgactcttcaccccgattcttgcccccactgtcgttatgattaagttagccttggatttgataggaccataggatacgcagagctgggagacattggtttctatcacaacattctttatatattttatttttatattttatctcagatctcattatcatcgctatcacgttcttcgtacatttactctcaagttcaacgtaggatgtagctctagtctggccaatttttcgacccgctagcatttataacgccgtagatgaggactacagagatgatactcgtagtcatggaagtttgaattagccatcgaattcccaaagctcctctgatgggtgatatcttagtttgttttacaatttggaatatctcccacgaagaaataatgtgtatgaataagagtggagctgagaaggatagcctgatgaaagttttattgcactgtcaagtactaaacccttactattgggccatgagcgtctaagtgggaaatagttccacttactcttagacagtataatcattaagaagaaccaacagcacaaagacaaagagcatttttagaaggctaagacaatttctaggacaataaggaagcatcccacgtgcaaaatagctaagagtatacaacaatggctctgtcaatactctgattgggaatctctaggcataacaaagcaaacatggtgagacatcagtccaattggttgttatacgctctgttgagacagcgaagccatctgaaaaaaagggatcttaccagagacaaaggctttgtgatcagaatgagatcagaatcggatcttttctctggatagaaggaaaagaaaaaggcaagaaaagtgaatcctacctgaaactagcctgaaaaatgaaaggcaagtcctccaagatctcaaacccagactaaaaactgtttcttcggtgctttgcataagaagacgggatgagaacccatttaaccatcatttccaagaacagcaccatccagcctcatcatggataccccagactttacaatgccggacgacgagcccatcaacgacgatcctagcgagaatggcccgaagcccaagaagactcgccgcagccgctatgacccagagcccgactggtcggccatggtgcgttccaaggtcacgaagtcccaacatcgtgttggtcaggcctgtgatcgttgcaaggtatgtctatctatcatattccgatacctcgtttgctttgactcagagcaccatgctgacgcgtttgaatcgatatgtagctcaagaagatgaagtgcacgcccgatcttagaggctgcggttgttgccttatcctcaacatcccatgcaaagtcactgaccgtgtcaccggtgagacctgggtgcgtggcgaggctgggcggatgtgcgctcttatcgagaacctccggaagcagaatatggatctaaaggagcagatcgcacagcttcagcagaagaattcacagctgcagaactgtctggacggctcctacagagccaatctcatggaccactacgaggtatgtatttattcatatctgctaggatccacatctttgtgagatatccacggtttgatgctaactcagttaccagccaaaccttgatcccagaaatcatcaccacagtctactgtgactgtgatgcccttttttccatgatttatcatacctcgtgggcttagttccgtgtttcctatttgtatcggtcctgctctggccgagatggagtgtataatcgagaagattggggtggcacatggtgacaagatttgtgttttttcggggtacataaatgaaaggagagttctcttacagtagatgagataatcaaatactttcgtctcatttccaaaatgatagtcaatggatatatgtgtagtgtgaccatgtaagcccaaattgtgcactgggtatccataatagaaatgcaatgcaaataaccatcggcctttttatcaactggcattatttttccagcaacaacagatccctttgctttcacaccactccctcacagacgcagtgccaacctcgcgatcctcacccacaagtccaagtccctcgatgttgagccatgctgtaaaatcttccagaacaatagggtcgtacatgagtatcttctcatgccacgtcggtcgattacggctaccacgagatgatgatagcggcgagagccgaggttgaacgcgaacagcttgggtgatctgtgcagatatttctaccaagctgatttctgttgagtctgctgtgtaggtggttgcgatgggtgcagaggatgatggtcttttgactatattggaggaaacgaccttgcgcttggtcgggctcggtggtggtgtttttgtgaagatatccaaggagtggtgttgtacccggctgtcggccttggactttgaatagatatcggtgtagtgcttttgtacttgacttggagagggagtgatttcttcttctgagtcttgaatctcttctacatcaataaatgacgtagaagtcccagtgataggcttccctctcgggtttttctttgggcttgtctgggaataggtttgtaaggcgggtgttgattttatcgcgtcaagtgattttcggttctttataaatgttccagatttagacttcaccgtccccttcgaggtgggtttcggaacactgtccattttagaggcaggttcttgttgttgttcgggttggtaaataggctggctgccaggggtagcattgctaccatgtttcgattcccaacattgttgaaggagatcgatcatcttcttgcggcctctgactgccttgaagccataattagagatctgtttagacaactctgcatccgtgaacccggtatattgtggcatcgagggcgcctgcgagctagttggctgggaaccgacgacttcagtcggagtatcattggctctacttgcaggttttgtagcattcgccttggccttcgccgtagtcgtagccatagctgtagctgtagctgccaggatcggagcctgagcttgaacttgtgtgtcagaatccaagccccttttggtcaagggtggtgatgatggtctcttttctgggggtgaatctatgtctgcaaattcaagctcgaaccagttcgtttgaagaggtttgtggcttgcttgttccacaccctcctttgcaggaggttcatccgtcaggtcaaccacgtttagtgtttctggttgaatcaaagatccttcggtgtctctggcgccaacacaccatagattcctggtgcctgccaaccttgatacaaaacgagtagacgactcttggatcacgctggggtccttattgcgcgtcccttctagatatgaaagactttcggatgcatggatggcttgctgagtctcccgcagagtctgcggcgaatcatctctttgcaattgactgcaggtgccaaatacaagatcttgatcattcagaagttcaacggctgcttccggggaaagtaccgtgaacaaagactgtttctctgtctctttggcctttcttcgtctaccttttgtcgttctgatgtccggaaggcaatcgatcaccggctcatcctcttctacatcatttgttgaatattgcgcagtcatgcgcgcagtcaacgtggtgaacttcttaggtttgcccttggttgtctttttgggcttttccaagttctctctttgagcagacgcctgatcagttgaatcagagtaccttccatcgagtgataattggatttcaggattgaccaactctatccgccgacgtttcgttggtcctctgccattgtcgttctgcaaaaggtcgcgggggttcaaagctaacccagagtaattataatcggataccaacttgccaaatacacctgtaaggttcgtaccatgatccttatctgggatttcaccatcgttcacggtgacagtttcctcgtaagcggtctcccttggtggtgtccagtccatccttcttctcattgcctcgtctagatgtaacacctcattctttcctaaaccatttgattccttgggagtagatttgtcgggtacatcttccgaaggagatgactttgtggcaaccgtcttcttcccacctttgctcgatttctttgctggttgatcgccgcttgtctttgtaactttcccagccagagtcatgtttcccgcatctttactcttggcattctttcgaggacgactttttgttggtttcattgtgtcattctttgtgccaacagtctctggctcggggtccccaagcgcaattgttcctggtgcatccgcggttttctgcgccttccgccgcggtttgttcaccgcggttttattgctggtgtctgaagtaggatccttctttgaaaatcgctttttcggcttcgtgacgtccttacaacaagtattgttcgcgattggagtgggaaaaaaccgggaacgcgtatgaggttggaacaaatcggatgtcgagcgtattggtggtggcgttgtacctcgtggcaagacacaaggtgccggcgttgcatcatgcctacctggccttggtgaccgtggtggatttggagaggacgacagaatgatcacgtctgcaatactggccatcgtggcaagtcgcgtctctggtgtttgcttgattgatcagggcgagtcgcgtgcactgcttgggtttgctatatcaggacatatcttaggcaacatttatacctagggaaacagtataaagtgtctgcgagttgggtatgcaggagaagtagcgttcggagatccgagttcaatatttcgatccacaagggtcgatcgcccgcggtcttggcaaagctctatgtacatgctcagtagtttggcccggcaaccaactgcattcaccccagcagagtaaatccagtttagacatatttacgctgaatgcttataggttcaattaattcttgatttgaagacgcctttttactgtcctgtatcacatgaaacaaacgaccagtgtcgaactgccttgcatctcgggaatatatcattcaattcatcattatcttgacttcgtgcaaatccggagtgttctcagctcaatcctggggctgaataatagtagacctctaaaaaccccataggatctgcttgtgattgacgacaggcatattctcaagtcggagccaatttggagctcaatgtatcccaccccgaagaaaaacagcacgacttggagaatgtatgcatttcccactcgtcccacggcaggtttcaggaatttcgagcacagtgaatttggttctttggtatgggcaattgctcacgatcccctcagggcgattgaactcaacaaggaattttcaagtcgttgcttagcctcatcgtttttcttggccgttggcgaaggcagagcccctagcttgtatgctttcttgatcttgttgatatcagacatctcggagagtgtctggtcatcgaaaagcacaggtgttccttgaaccgagctgtccaagtgggccgcaacggattcgtgtgttatctccggagagacagagaccttgaccaccaacatatctttggttgaatcggtgataccaaatctacggaatgattcggagatctaagcccgtgttagctccggctttagtggcaaaatcgtcgctaactcctaaaattggcaacccacattattcgtagggttcaatgagaatacgatctcagaatgcacattgtgagatttcagtcgattgtgcatgtaatcattaactgctctgaatactgcagcaatgacttgagcccttgacagaacctattgttaatgtcagttgcctagttccctttcatggtccttggtgacaactcaacataccatgcttgcatcgataaatgcatactcgaattctgcctgaccgtcgagaagttgacctttcagaaaggcggcattttgaacatcgcgatagagagcaacatgcacgggcatcaatggtagatgtgccacgctgatcgtctctagacttgaggccatgactaaaatcgaactgaaaccgaaattagaaagttgatgacgtatgtgtaatcaagctgatctgattaaacaatcaagtgagccctggagttcactgtctatcccacttcttgatccacgtgactaattctggaattttccggacttaagcggtcgccgacggaacatgagtaatcgcctccatatcatccgcgggcccgacatttagagacctcttcaatcctagctcttgacactccccattgcgaaaatggctttcttcctacggcgcccgttcgctgtatcctcggcacttcgccaggtccctaagctcacaaacaccgcccgattcattcacaattctcccatcaagccaacccaagcagcaaagcctcagggcgtttcctcgatcttcgcccagtctcgccagaacttccaaaatgccttccgtcgtacatacatgcagcagagtgtcaaccctgctcaggatggtaacttgacccagaaactggtatatggcgctgccattattggtggtacaattttggcaaccaacttcatcttcaaccgtgaaacgagagaggatggcggtatgcccgcttacgagcggagcttcctgaatgagacttttgtgcacactggtcttggtatcggtataattggtgttgctgctcgcgccctccacatgagtggctggtcttatcgtcttatggctatgaacccgtggctcgtcatgggcgtgggtctcgttggcagcatcggatccatgtacggcactttctacacttccccggataagtaagtttttcaccttctcttctttgttttcaggagaataatagctaacttttcaattaagctacgttctgaagtatggctgctggactctcttcaacgttacccaggccgctcttctctcccccttgatgttcatgaatcctgccattctcgctcgcgctggtctttacactgttggcatgatgggctcaatcgcttttgtcggtgccactgccaagcaggagaagtacctttatctgggtggtccccttcttgctggtgtggccatcgttgctctctctggtctcgcccccatggtcctccctgctactgccgctcgcactctgatgtggtctgagcgcgtttggctgtacggtggtcttgctgtcttcggtggtttcactctttacgacgtgcagaagattctgcaccatgctcgtcttgccgagcgcggcttgattaagcgtgatgtggtcaatgagtcagtcagcctcgagttggacttcatcaacatctttatccgcatggtccagatcctcggcatgggcaacaaccaccgtcgttaagctccttcatatccactatattaagtgtgcaacctgatatcgggtttgtaacatcagaatcgttgtttcgccttcttttttctcgttcattttacaaccgtgtatttgatgaaccaactgttcatatttttttttttattttttttttggtcttaaactttgatgcttcttcagatgggcaagaccagtcaatcactgtttttacttaccgagaaacatagcagatagggtatgtagtgaatataatctccactcccttgacatttctgctgcatccggaagcatagtgataaccattggagtccgaaaaactccgacttggaagtcgacaaaagcaaagaaatataacacataactagtaatcactactggatagttccaaggttgacatagatatggctaatgctacaatatagttgaatacggtagatttttggtagtgatttaacatgactgccttcgcaacaagaatatactggttacctagcatctcgttgtttgcttaaggtccagatatcatctagatacatgcacatattgcacaatgcaatggactcgaacttatcagaggggcagattgtggtcatgtgattgcaagcttctcttgacggaggttgcccaataagaccgccctccgccctctgcagacttcagatcgcgatacagactcattgaccactacaaacgtgcagattaaacctcccaacataatatcaacacagtcgcactagccttcttgcttccctacctcacaatatgtcgaacgagatggaaattgacactcctgtcgcaaacgacgacgctcccgagcaatcggaccgcagttttgaaccacgcacccaggggaacgcggtcgccgtgcgcagtatcgaaggatggattatcattgtgtctaatatccacgaagaatcgtcggaggaggatgttaccgaactctttgcagagtatggtgaaatcaagaacttcagcttgaaccttgatcggcgaacgggttatgtcaaggtgcgcatcctgaatttcacaactacctctgaaacgacccccaacaacgttccttctgaaacaaggggacccttcttgactcgcgtccaatgaaaggatcactaacaccactattttggtagggctacgcattgatcgaatactccacgctccccgaagccagtgaagctatccagaaccttaacggttacaagctcctcgaacagacgcttcgtgtcgactatgcttttgtccgcccgcccccatcaggcaagaacaagaatggagggccaaagggccgtgctattcggaatcgcagcagaagccccaaccggagtcgcagccccgaagctggcggcgaccgggaataagccttcctgatggatgggaacgataaaaattgacctgcatacattgcttgtgatcttctattgatacctgggctttgttttttctcgcatttttctctatacctcgcgctgtttcgttcgaacctttgcccacccttcctaccagaattgtctacaaatgatggacatatcatctagtattcgccggcatggccactcctcagtcgaacctgtatgggtccgcaggtcgagtgtgggtgtgcatgggacacatacacacaattggtacgtgccggcgccacgatagattgccataatggtatggaaacccgtccttaacctttaacttcaatcatgctgacttctactcagaaatgaaaggccgtttgatgaaaattgaaaattgatgtatgagcatctggtcaacaaagacaaccttggacctcgaagacctgcctctgggagtaatgtacattatgaagaatggttcttcttaattataagcgaccttcatcatacgcacttgtcttgtgacctatttgaagacaaaatcaaaaatgttagtagagtattagtatacgatgtattagcaggatcccttatggggtggaatgcatcatgcgatagccatgtggcgcaagagtagaatcgataaattattttggattctcgagtgagttagtacatatcgtagagtcagatggtttgaatgcttttaaggctttgatgccatacaatggatgtggatgttcacctgccccggtgcccgggtgggcagcgggtcttgtgactaagcctaacccttcccggcttccccgcatggcgcatgaggttatctctgtccctcttttttagtcgatctcattgtgccctctctactccctattcttatagacggactccagcatcctgtgtctgggagtcctactctgacaggatatatttcctagggcagaatggctccccaatacatatcttttacccccttggggctatcacgacctctatactgtattcttatgctatgcttcctatcgttttcagctgcggccaatgcgctggcgtatccatctcaggaacttttgggagtgccttcagtttccagtcccgttgatgatttcccaaaagtctttagggatactgaatcggcgcgggaagcgtcggttcgcgaccccattctgaataccttacaggatcttatcgccgccctgcaggtgatgcaagacaagtattttgtgctctggcagggcacgtggcccaccagtatcgattggaccgcggcggtactgggtgcacacgtttcggcagcgctctcgactctaacctcaggcccgctcgatatccccgacacggatgaattgcaaggattatccttcttcaggctcgagcacacggtcaaccgattcttcagccatactgccgcgttctactttggcgagaactctttcagtcttagaaaccaggcctacgatgacatgctatgggtcgtgctagggtggttggaaaatatcaagttgcaaaatcttcactcggaccttcactatgtctcctccaacgacagttctggagaactgtggtacggtactcagttccagaactctgctgcacacagagcacgcgtcttttacgagctcgcctctgctggttgggacaagaccctctgcgagggcggcatgatctggagcccatatttgacgccatacaagaatgcgattacaaacgagctctatatagccgcaagcatcgagatgtatttgtacttccccggtgattccattgacgcccctttccttgtcgactcgggcacgcagcgcgcacggaagaacccatacaactctcttcatctgcaggctgcggttgacggatatgagtggctcaagaagtcaaatatgactgggatcggcggcctctatggagatggtttccacatccgtggctggcaaagcgcatcaaatcccggctcgggacaatgcgatgagcttaactctatggtctacacctacaatcaaggagtcattctcagcgggctgagaggactttggctagccacaaactcgcaagtttatctgcgtgacggtcacgagcttgttcgcaaagtactgcaggctaccgggtggccacatacctctagccagcagtggaaggggcttggtcgcggaggtgtgctcgaggacgcatgtgattctcatggaacctgctcccaggatggacagaccttcaaaggcatatttttccactaccttgcaggattctgtcgacctcttcagccgcaagagaagcagttcctggcggacaggacccgcagaaatgcagcagatgacgactgggccgaagtctatgagcagcatataaagcagtgccgcacctatggttcttggattaaacacaatgcgcaagctgctctggtgactcgtgacaaagccggcaagtttggtacctggtggggccgctcgtatcatcagctggatgccaacgagatcgtggatagcagcactatcccgaatggtgctgtagattaccgcaatgccgatcatgaatcaactacaggcttcacaccgaaggactacaacgatcgtggccgaggccgcacagtggaaacacagtccggcggcgtcgctgtgttgagagccctgtaccagtggcaatcctatgacgtcctatgaacaaaacaaatgaacggtttgggtttggggttggtgttttggcggtaaataggcaccattcattgcatccagggctttgaagctctttttttgtacatcctgcacagctacagttactggggatcattatcatatcgtccaggttcgacattggcttctcagtagttacgattttttcaaactggaactgctttcgcatcttgacaacttcccctgacccttggacctgccgatcaaagcagtagtactacaacgctagtcttttaatccgatcctctatggatctcgcatcgtgcacttatcaatttagcaacacaacgattggtggcaatggatccccagcttccccattccgatgatcctctccgcagagcacggcacataaaacaggaattcaaaaaccaaaaccggattacatagttgatcgtcggatctgcaacaagtggacactggtgtgagggattacctatgttgggttttgcgagagacataggacattttgcggccgacttacaatataagacatgtttctggcgatagctacacaacgttgaggactccagtttgggtctgcttatgcgatacatgttgagcaactgacaataatatctctgtgttcccggagtgaaacctatgcaatgaatgagagatctttcatgttgtcttgccgcggatatgatgttcgatattgacccccagagacgatgtgagacacagttcggcacatttctaggtaagttgatttcctcggctattatatggagatcaaactctattatactatctacttcgggccgttggagagagaacaggtggatgacattggatgacatgttggatgttgaatgcatagaatgaccggagggggcctctacactgtagataaggtgtattccttcggattgtcatccttcagaccaagccttatgaacagaagtatgaaagcgacataccttgtcaccactaaaatgccaaaaccttgaattctcgtcgcgatgattgggccttcaataatacccagcatcgaagaaaggcgggaaggtggccacttagaacacagagaggggcaaaaagaagcaaaaagaagggaagaaaaacccaaacatccactctagcgtgcggactaaacatccttgacgccccctccgtaatgagggacaaaaaaacgcgtccgtatagggtgggggtttcgggagtccgtagggcacgaatcaacgcgacgaaacatacctgcagatcggcggggactttgtttgaccattattcggagtagctctctttgggacgccaaaaataaataaaaaagcaatttcagggttcgcatgatattacgcggatgtctcatgaacaacgggtggaatggtaatagctgtagaaatgtggtctgatatcgattttgtctcagtttgccccgatggccacgtttttctttcttgcttagcgggaaccatagttcaattaatctactgtagaaatgatataccctaaatactttatgttgcaaaccttggaattaccctaataccaatcttaaacatggttcttatcgacttgttagattacggcccaaagcatgtcacacgcacccccccacctcatggggttcggcgaagagggtgtacaagtacggagtacggagcactccgtacacctttggcagttacacctgtgctcatggggaaggtactagatacggtaggtctgagcgtatagttcagcgctgttcctctgaggtcatctgacaacgggacctaggaacgcattttggtttgacagagggggtgagttggctgtcataacctcataagcaagcccagcggggcaagaatagattagttatgtaggatgtaggatgtagaatgtatactcgaatattgatatattatatttctttggatcaatcgcattctgagtttatagtctgacggctctaactcggcaggcacgatgaaacccgatgttgacaaaggcggaaagactagtacatatccccggaccttgaaggtggcaccggcaatttggatgagggtctaccatatcttgccgaaaccggggagcatagcagagagagtcattgaaaacgatttgctgagatcggcatctatgatggcactcggtttcacctcctttttggctcggtgtcgaataataaggaagcatgtcaaatccagtgtcgaaggtcataatgaatgatcgtctggattccaagcgttgggcgcacattggttgcgatggagtgggttaaggacgggaggtggtgactggtcgcgggatattacgacaggccctgcggagcaagaaaatgcagttgtgccactgaactttcctggctaagttagtcagttaatcttccgcattattctccagtgctgtggtcagtttttctctctcggtttttttttttttttgtggcggtggaggcggctaacgaggggcgaacggggatttatcgtcggatatgttttttgtgccttccattacagtgcaacatacgttctatattggcagatggacaatatgaaccaaagaaggaccttcgggatctgtacggggggttactggcactctcctttgtccctcggccgatcttggccaagggcgggtatctaccccttggaatcttcgtcaccgtatgttgtacgttgtagaatcatgaccagtatacaacatatccaacctccaacctcgccgaggtaggtagtagaattggtgtactttggtatcaccacgatgtatacggagtaagtatccgcgatcagaaatacgttcctaaggggccaatgatatccatggcgtcatttggctctgaggctcgatcgacattgcatgcccccccccctctgaaggacaggggtatggccacatgtgcaatactgcataatacgtgattaatacgcgattcataccgatataagatcggttttcttttctttttttcttttctgctttattattccccatacccgtagacggcatatccgggtgagaataatgcaggaagacccaagttcccggagagtgactataaaatataaaagaatgcagactccgtggatcgatatacaatatacacagttaatctttttttttttccacaatacgtgtcaaatcaatgctacagtggagaggaaagcgtgtgccctatgatgtaccgagtacctgatcggaccatgcctcgaatagggaacggcggtgtaccgggtacttgtcgggaaggtggtgtgtggaaaggggaatctgaggagccacccgttagttcctgaacgcctctcgtttctagaaatcccctctttttttcctttttctgaatcttcaccggttgattttgattttattgggtttatttgattgatcgaggggggcatttcgatgtctatgggctggctgggttattttaatattgtgccacgcgatgtcgacgggaattgcccttatagtatgggtattaattcatctataaaaaaaaaaagggaataataccgacatctagaagaaaataagaaaccagagggagcatccaagggacatgggttcctgttaagataggcaattataccggaagactccataggtaccccttggtaccgcacccgtcgtaccacaacgtaggtcactctgaggtacccctccgctgtaacgccgataccgaaactctcttccttttcccccaaagctcttttcggttctctgactcctctctctctttcttcaaactatcttctgtctcttctcttggaaagtcctcctcttgccatatctatagccccgatccctcccttgtggccaacctctcttcccggaacgagcgtggaaaaaaaatattccctggaccttccctttgaaacttacaccactccggtttacctttctctcccctctttcccaatctcgaattggattcagcacacacgcatttcggaattactcgtctagtcaagagtcggccacggtcgtcttgcgaattgcacactcctccatctcctttcgacttcccaccgacccggtagctacctcaagcgtaacacagatttcttgtctggggtacatcgctaggggtagaccgtggtcgttcatcagccgttactttccctccggtctttttttttcagtgtgcatccccaatcgtgggagcctgatcagaccgccatcctggacctcatttcgatattgtgtgtcgcgaagcagtaacctttatggcatcagataccgaaatgacagaagcctttcccgttgatactctgccgcaccccaacgacggtggccacatgcacatgtcgtcaatgtcatcatcgtcttcgatatccgacgcagaacacgagcgccgaggccgatcagaacgtccgcgaatggcgagccgcaaacccagtgcttcaatccttgtcccgagagaccaccccgaaattgaaatcgaggaggaagagtttcctcccgacgatgcccgcgcaatgagtccacgacgcaattctgccgacctagagcgtttaggcaaggaggcccgacagaccctacaagagtgagttgaaaaaacacatccaaggcgtttttgctactgaattacatcagatccaagattccggcagctaaccagatgaactcggaaaaatacagacaggccaaggctctccaatcgtcccttcaagctctcgccgaacgcatcgacgcggtcaaatcggaccatgacaagttggaaaacgagaacaaaatcttacaagactacattgggggtctcactcgcaacatgaccaagagcgaaatgacccgcagtacgaaagcacgcaaagcacaaaaataaaccgcctttccgagatggcgcaaggtagcccggatacaacatcccgtggacgtcaatcgggaggaatcgcctgtgactctgcagcagggggttccatgcattacaaacggtcgcgggttttaccgggattcgaattattttcacttcattacgacgaaatccatggtcaacggatttctcttctcaccgcacatccaactggtcgcttaatgagttacatgcctaatatccgcatggcaggtctcataaaacagcagggttagggaatgtctgtttacaaccgtttctccttccgcaatggggtgcgtttacccgggggcaatctctcggttaccattttctcacacatcatatctgccacccgactggttcgagtggccaccctgaaaactcaccacctttcagtttaaacgccaccaagtcaccatctccacatttcccctgtccaaccggggtcagctgctaaaccgggggtgaggctgaatcccgaattcttttactcaagggacttcaagggattgcttgtgacatcattgcatgctcacctgacttcttggcacttgctttcccgagttcttcattacatcatcctcaaagtcggtgtgcaaccttccatcctatcatcttcacgcagtgttccaccctgcctctattcaaccctgtcgatattattggccctttttatttcctattccgcactcttcattcggcgttttcttcttatctttatggcggctcagtgaacacgtttcacttgtactttttcttcctttttgttgtctatgcatagcaccttgggcgtttcggggactgggactagactcgatttgattgaatggctcctgctggagcattgaactgtttcttcgtcatgggcattgcatggtggcggtcatcgccacaacagaacggcgtgggaagtggaaagcatctttaggggtctttggggcagtccatttatcttctcgcatgccttctcgatattcgaggggctctctgtacatctgcatctcaacctgtttttcttttttttctcttctttactgtctctgctggactgactcgtgtctctgcatgcggagacaaagatgccgctgtttctcattgttatcattgtggctctatttctacttcttacacttgacatacccaggagcgtgcatgtctcaagtcctctatttccctttattgccctcatacccctttttatcgagcccacatggctggtagcattgtggtttcgaccatactaattgaaaacatttcaattaagactgtcttttgtagatctctatagatccaataaaaccccaaatgtggcttgctacactatgacacaggtaacccgatgcggccaagagcgacactcggcgaaacgccatccaatcgactaacgggtcattacgagcggacaaataaccggaccgtatgtcctgcataccccgtgaagaaattacgccgatcaatccgcgatgtgacaccggcaggcgcacataagctcggtagtgtccaattaatacagccactgatatcattgccgccctcgtctgcagtatacgggcatatatgcgcatatccgcgcatcctagtcggatatacagtaggaatacggtgtaccgattcattatttgaaacaatgctttgtattagttaaggatctggtacgtaactaattagttatatattttggatgacctatccaactggttctatagggtgttctgattagaggccgtgctgcctatgggtagtaacgaagatactgtgaataatggagtgtcaatttagaggcaggatgaggctgttatgataaattcttccatctgcaccgcctagtttactcggacaagacagcttgttggctactctgcgacatccggggcaatggacatagactcatacacatacacagtcatccatgcttcagctacaatgattcgcaaggtagttactggaacagtgtacggagattatcttcgaaaccacatctagtgagaatcaaaacgccaaaatggcacatatacggggagtgatcaataggaaaggtgaaaagccaggttagggatcagcagggatacccttgttgaagtcctgataaggaactgatttggaaaacttctgtgtgtatgtgtgttgggctgggggagtgcgcgcaaggggactctttgggtagttaagaggcaaagtaggcaaaataacaaggagaatgaaaaaaacgaaaagaggagacaggatggatatcccccagggcagagaacaagcgccgggccaaagcaaaggcaagtaggcaagcagacaagcagagaagcttcaaggaaaaaatgacccagagagcagggtcacccaaagatcgcaatattctcacaccaacccttgcgagtccctgcgacaataaaccgacaatcggggcaacacatctcatcatccttcctccttcatctcgaatctatctccttgtactagaagacccgtcgcgcgctctctttctctcggttgttccatccgtcctgaggacgcgtgcccatcaacaaggtctttttaggtgttaatcatttactcggcggcgggcttctcggcctcagcggccggggcctcctccttcttctcagcaggggcagcgctctcggaaacgggctcagcctcggacgaggtccagagagtctggtgagaaacgtgggtcagtgtatgaacaaatttgaatcagtgtgtgatttgaacacttacgaggttgtcacggagaagctgcatgatgagagtagagtccttgtagctctcctcgctcagggtgtcgagctctgcagacaaacattagctttggtcaatgcacgtgacggaatttgaacataccagcaatggcatcatcaaatgcaagcttggcgaggtggcaagcctggtcgggggagttcaggatttcgtagtagaagacagagaagttgagagcaagtccgagacggatggggtgggtaggagcaaggtcagtcgaggcgatctcggtggcagccttgtaggcctccagagagtgatcagcagcacccttgcggcggtcgccaatggcgaactcggcaaggtagcggtggtagtcacccttcatcttgtggtagaagaccttggactcgccgctctgggcggacttgatgaggtggtcgtccagaacctcgaggatatcgtcgcagatcttggcaagctcggcctcgatcttttgacggtactccttgatgagagtgacctgggactcgttgcccttagactcctccttctgctcaatagaggtgacgattctccacgaggcacggcgggcaccaatgacgttcttataggcaacagacaggagattgcgctcctcaacggtgagctcaacgtcggccgaggcgacgaccttcatgttctcgaccatctctgcgtcgcattgtcaggagtctgtgcaactgaacgatctagatttaagagaaaccaaccttcatagcgctcggcctgctcagcgagcttggcgaggtaaacagcgtcttcgtgacccatggtgaatgtgtgttttctacagtccgaactatgttagccaatctttttcttctcacatgagtctttattcttggattgatgatgttcgatgcgagggctgaaaatcacgccatgggacagtgcaagtggcgatggcgaggggtagatatcgaccctcgaccccccttcgaatatacggggaagggcccagttgaattttgatgagtatcacatagaacgtctctggatcaagatattggaacgaaaaactaaaagaccccagagatttggccgatcatgacgatcgtggcggttacagggcccttcttcccgtgtgtcgttggggagtatcgcaggaaagcggtcgcggcaacgggtcaactcgtgaacagggagacgagaacatgtggtttccaccgtagattgtagcgcgattccatgatttgaatttgggcagaattgtagttttcagattggtctcttcccatcatggattgttgatgtgtgggttttgcggtgatgacggggggtgggcatagaaatagggcgagaaaaggacagattcaactgggggaacgacaggaagacactgacctggtttgtgaaagaggaaatgaaggcgattaagggatagcaagatggaagatggaagagagtagggagttgaaagagaggaggtaggaggaaaggaggggggcagaaggcggtgttgttgggatttacctgaacaacccacttctgttcgggctttgtggttttttttcttaggaaatatcgaaaatgacaagtcgaggtcacttggacctgttctttttcttctaattattttattttctatatatatacaaaaaaatccaggaagatatggcttttttgccaatctatacacagcacaccttctctcatcgcttctgtgtggttcggtgggccgcctacagcgtcatccctcattcggcatccgccaatcgcccggttccttacttgcgcctcattcgagatcataaaccaaggcagacagcatgtgtcggaagcagtctagaacgaatggatatacagcataaaggcttggctattggcctaccgggatcgcaaaagaacgcaaaagaaggggggaaaagagtcagctgcagtagattaatgatgtgatcatccctgcaacccctgtgatccgaagtagttgaagtacaatcgtatacaactcgcaagggcccaagtggaaaatcgaatgagaaggccgcgacttatcagaaatttttgttcacatgaccttcacctgacataagcttgtttcttccgaatccccatcacatgatttggcttggcacgggacgttaccttcctcgtacccgagctcacctcgtaaatcctacctgaaccacttctaccatctaaatcatcaacatgcttcgtcaatttgttcgtcccgctgctactgccaaccgggcagttttcgcccgctccttctcggtagccgtccctcgcatgggcgaaggtgacaccggtgctccccgcactagcggtggtacctcctccgggtaagtgcgatgcacgttgactgcggattttacgctcgaagtacaattgtaccgagtagacagcccatgtctgccttgccgcagctgggtgacatatctgtatgatcgctaacgttgggtcctactagtgactcgttcaccaagcgcgaggctgcccaggagagcctttacatccgtgagaaggagcttgagaagtaagttccgcgcaaagccgagaacaatcagacaatcagactcgagcggggagctaatctattttgacaggcttgctcagctcaagaagaagatcggcgagcagcgcaagcacttggatgagctcgagagccacatgtaagtccaagtctggaaatactctcctgcctatttccttttcagttgaaagtaaacggcaaggctaactagtttctctttagcgatggcttgagccgctaaatccatacacccattcatctcatgtttaatatgaagggcccttccattgctgtgtataataccatcttcgctccaacgagctatcgtgcttgcctgctgcattgaggtcgtatcgttttcagcgcctgttcctaaacaggacatctctctaccatagcatatggaatttctgcgctctggtgtatagctcagtagctcactcggaaatattattgagaaacctcggtaaaataaaccatgtttcaatctgtacggagagtagtcttaataaactacctatgtactccatatgttcttggtctttgtacaagtacacgagattcctcatcttttcgcaatgtttatgctttcttttggcctcaactaacccgagaacattgtcttgcagcaaatgtttacccaaccaggtttaccagcattgtacaaggattatacgagttatatgactaagttgtatcttgccagccgtctccacaaaacaaagcatgatcacccagcttaggctgaggctccttccatcttacctcgacccaacgcccaaccccccagaaataccccgccatgtctctcctcagtttgccaaacgaaattttgctagccatagcagagaaccaagactgcgaaaaagacataaatgcgtttgcaagaaccagtggccgttgctatatcctcctgaaccccttcctctatgcctacaacgtccgagagcaccagggaagcgccctccattgggcagcaacccaaggaattgtgagggcggcccaagaatcactccagcaaggagcagaaattgaatcgagggactgggaaacacaaaacccgccgttgatactggccgcttactacggccatgctgatatggttaccttcctgttggcacagggcgctgacccgtacgccgaaagcggcgggaggacccaagacgcgatcacatcagctgtgctccgcaataaaacagccgtcgctgaaatcttgcttgatagcgggattgatgcaaataggacggactacaggggaagcagcctattgcatcttgcggctgaatcatctcccctcagcctcaaggcagtggtgagaattcttattgagagaggtgccaatctggaatctaggaatgaactgagtcagactccgttacaggtagcgtgtaagtctggttccgtggaagtggcccgatgtctcatagagagcggtgccaatttgaatgtgcggagtgaaagtggaagttcgctcctgcacctggcgttcagtgaagtcaagaccgttgagttgttggtgcagaaaggagctgatatcgaggcgaaagatgagcaaggtgagacaccactgcatctggcatgtcgggatggctgggtcgaaacagcatcattcttgctggaccatggtgcagatatagagtcaagatcgctagatgggagcacaccattgatgcggggagtactctgggagagtattatatgcagggagctgggcccaacctctgtgaccaccctcttgctgtcacgaggtgccaatccaaggcagggaaatgatttcgatatcacaccattgcattgtgcgacggccaaagcaaattctgcgcttttcaggctattgctacgatatggtgccgatgtagagccaaaaactagggctggcgtgacgccgctacacaaattagcgtccactggctcactggactccgcaaggcaattgttgcagagaggcgctgatgcacaaccgagggacgaagaaggcaatacaccattgcacatggcagcggagagaaatgatgtggaattcatcagtttgctgctagcggcaggcgctgaccggctggtcagaaacaacaagggtcaatttcctatacatgtagtatcaaaagcagcacacaaatcagaagaaagacagagagaagtgatggctctcctcgaggtttggtctgataattagcattagccatagtgaccaaagacataatatacaacaaatatctgagaagagtttgtcaatcctattgcattagattctacaaaggttcgaaatttgttaatcacaaagcacatgcaagcattttattgtgacggactattagcattcccagactacaacagaaagcacatcgaggtgccacgtagccaataactccgagttcaaatcattaaaaaaagccatccagccctttaccgtccttgcatgaaggagcggtagaaatcatcagcagtgttgttgttgcccatgccattgttgggataaccgtatccgagacgggcagagattgattggcctgccttttgggcggcggtgaccttggactgcagatccgaggtgccttggtcgatgagctgcagctgggacaggtgcgcgttgagaatacggacaatctgcgaaatctatagagatgcgtaagcaaaagaataaccctaaagaagggatcaatactggtttgtgacttaccggctcatctgcgttgttggtcttggtcaatgtggatgaagcaccgttgacctcttcaatcatgctggtaagatccttgcccatttcgtccaagcgttccgagagcttttcggccagtttgtagctaatggctagattagcaaaccatatcaaatgttgcgttgtgtgttgtacttacgttgtctcacgctcctggtcaggtccttgaagggactctccagggcccacctgcttggtaaccatctcgtcgacttcacgctcatatcgatctagccatgagctgagctcatcctgttgaccttcaaccgctgacaattggcgctcaacctcctgggtagctcgatccgcatcaacagtgctgccgtacagcttctgaaccttggtaccattgtccaccagcagacggtcccactcggaaaccttctccgcctgttcgcggaagtccttttgatatttgccgagatccgtggcccatcgggtgatgatctcatccatagttttgttcttcaggcgtgactgggctggaggagcggggccggcagtagactggccaagggcggcgggcccagctgcagcagctggagcagcggatgtagtcgaagcagccgtcgtttggggtgctgaactggcggaggtcgctggttgcgccgaggtggtagtagcagcttgactgaacaagccgcccgtaggtgcagcaggtgtagtagtggcaggcgcggtagtggccgcagtacctgaagtagttgtgggagctgaggtgttgaacaggcctccaagagaagctgttgctggagtagtcgacggagcagccgtggatgtagcacttccggcggaagggaaaaaaggcttttgaggggtagcactcgaggtagtgggtgctcctagggagagagttgtgtttgcggtggaggcaggaggagtgcctgccaggttcttgaacatagacggtgtctgtgagctttgcgcaccacccgcgggtgcagctgcgccgaagagcttaggagtgctatctgcagtactcgtgggagtggctgaatcggccggcttgcttccactgaatagaccactgctgggcgcagtagcggttgcgccaccaaaaatcggcttggttgctccccctccaaacatattgttagatgcctgtgaagtagcaggcgtggtagatgacggcgctagggtgggggtagtcgagactccgaataagctactgggtgggttagatgccggcggaggaccagcaggggtggtggagttgttgccaaacaaattgcctcccgcgggagcgggggtagctgttgtagcggcgttgccaaacatattctttgcacctgctccaccaaacatcgtactaccggcaggtgcggccgattctgtagacttgttgggagtctggttgccagcagtggcgccaaagaggttaggctgcgtgccagttcccgatggagccttgctgccgaagttgaaggccgaggtaccgcccttggtcgcattggcagcgcctgcgtttccgaaggttggtgtgctttggccacttgcggaatttcctccaaacatcgatgtgctgttgccggtggacgaagctccaacattaccgaagagcccaccaccagacgcattgttatccttgttggcaccgaaggcattgcctgctgtgccgaaaagagatccactagaggcgccagtagaggccggggagtcgaaagagaacaccatggtgctggtgaccgagcttcaggattgggagggaaaaagctggatggagagaaagcaccagcgacacggagcaggaaaggtgggcctgcagaatggatcaaaagacccaacagtaggagaatggagctcttgatcgaatgaagtgagacaaagagcccaagggtggaatgagaaaagaaagtcgaagacaatagacaatagacaataataattggaaggagtttggcaagcacgcgctgaaaacttggcgccttgaatacaaggcagtaattatgcctgaataaagtggctaacatattgataattagtgcctaaggcatacatgttctggactcacatcgatcgcagggaaacaagtcctcactgcgcactacacacgaccccattgcattttgaattattcatttatacgtgccccttctttcatgttaacaccctgaattcaagctgcaatcatgtcggaggggccgtccgatttgtctagttcgcatctagagccacccagcagaactacggaaatgcaagatccaggagctggcgaccacagtacttaacccttccatatacttgaatatttgtttgaaactgacatttgttatagtagcttctgaaagtgaagatgaacacttctcagatgccagcgaaggcaatcccgaactcctcccacaatctggtcgcaattcccctatcccacgaacgcgagtcgagagggttgacagcagcacccaacatggagagattcctggcacagcagcattcgaaaagagagagcaggatgcagttcctgatgaggttgaggttatcccagaaggctcggacagccagatgccttcgcctgcagacgaccaaagcttgagcccagaaggcttaccgtttccacgcacagtggttgagaaggtggacccagatgaacctagccatggcgaagtccccggaacattggcccatgaacaacgtcttgccgatgctgtgcccgacgtggtgaccaaggcttcagattccgagagcagcccaacgccaccagcatccgaccctacacttcctgagaccgatggatcttcaatagaaattcccgagacacggctcgagcgggtggacacagctcccgctgacgaagacctgccgccacacccacaagctcataaaagctcagcaagtgacgcattacccgatacggtagaaaccgtcccggatgtctcaatacatgatacagacctggaaaccaaagacccctcattagaggatgacatgaacgatgaccacggatatgaaaagcaagaagcgggtgatgattttgatgaatttgtagaagagcaggaagacatgggagatgatgattttggggattttgatgacggcttccaggagcccagtgcagaggaagcccccatagacgataccgcggcatctcagcaatctcgagcacccccacctcttattgacttcgacacatacacatccacctccgcactcctcgattccctcaaagacaccctcgacattctcttccccgaaacccaagacataagctctctcccccctgtcgagccaatccccgactccgcagcaatcttcagcaccgagcgatccctctcactgtggtcccagctcgtggcaccaccacccctccagcctcagaactgggtaaaatcccgcattcgccgactattcctcgtatccttgggcgtgcccgttgatctggatgagattctcccagcctccaaacagaaaaagctcgttcttccttctattgaccttgaaggcaccggcgcaaagagccccggcgctcgttccgctagtcaagtccgcaaagaagaaggtaacgacaacaccggcgaaaaggggcaagccccctcccgccagaaggctacttctcgccgcggcgcaccaccggcaccggagatagacctctcggcggtccgccggctgtgcgccactaccgatgctgcactgagtggtctcacagattcagagttgaggctgcatgtccatgaactggagcatgttgctcagcgcgctagttcggtattggagtactggctgaagcggcgggatggcttggtcggcgaaaaagaggctttcgaaggagtcattgagaacctcgttagtcatgttaggagggtcagaaagtagtctttccttactcgggcacttggtgtactatctgaatgcccaatataatatattttatataatctaatgtcgataccagagaaaatccacttatacctgcgaacttccctgcgtagactgcagcgtacgagaggacgtgtcccaagggattttaccccgtaaaagaggggtccacccccatcaaaagctccgacctggctccactgtattgttccaaggttgatcttgcgacctaggtatgtccttgatggctatcattgttcacgatgcccttgttctgcgagatacttaatccctccccctctcgttcctctctcaaaaagaatgcactgaagtatgatgacgcaataatggggggttggttatgcacctctttcagtagtctttttagccgtcttttggcggttttttgtgtatggatgtcttcttcccctcctaacttacctttctatgtatctgggtttctgccttgttcgtacactcccaagccagctcacatcctgccttcctagccgagcacaatacaacccaaaggcaagtatctttgtactcatctcatcaggatgtcaaacagtggtgtcactgccgctctatcttttccgtccgctctacctgataaccacatggttcgggtgtttacctctatgaaccgtctccgtaccgctgcaaatgaggtcttcgcatctcttgacaacaaacaaagcacaaaccaatggcttcttgttcttggcctccccacaacagtcatcaagcgcctcgacgaagaccgtaactgcctagaggcgattaattaccggttccaatggcaaggcaggagcggtctgataaaagtcatcccgacagcccaacacgaaaccatcaccacgagggttatgttctctgtgaatgacgctctcgcagcaatgggtctacactggagtgattcagaatgggtcggccatactacctacaagccgaatcttgccaaaggcaaacagcccgacaatgcatttctcccgccctctcgctgcacgataccactcagttcgacgggatggccaactcttgtcattgaattgagaccggagtgtctgaaagcttgagccagctccgcgcagacgcagcaaagtggtttgcagattcgaacggcgatgttagaatcgcgctggttatcgccatcaaggacagcagggttgacattgaaaaatggcaattggctccagaaggtgcgtccccgctggatctccaggtccccgacagccaacaaccatattgcgcccaggagataaccatcacaccacaaggtgttactgggactccccttgtcttgcccttcaatgctttgtatgatagagtcccgggcccaggggaaaccgatgtcctcatcacaacggcagactgtttgaagattacgacgaggatgtggtgaagagcacgaggactgtgtgcctgaatgacgatgttttgactttggctacttcccggtatggcttcgagggaaacgctggacgagttgatccatgatttatatttggtatttctctgtatatgctaggaaaaacgcagcatttatgtaaacttctctcgtcatggtgtttctaaatgtaatactcccatcagttcaaaaagcagcaatgtctgagggaacggaatgccgagaagtggcagaggaaatccaatacataggtatttatcttgatatatgtaagcaagttctagtctagtcacaacaccagagagctcaggtaacctggaaaataagatgggagttaaaaaatgagctagccgttgagtttcacgtgaagcattggataaataagaaaaaggcggacgcagccgtgaaaccagtctccctaacgccggagataacatatcataagagaacatggaggaaatgcatttgaaaagcacgcaataaggggtatcttcttttcaaatgcatgcaaagataaacgaaagacagtggaaggccaaggccgctagaaaaaaagaagaagggaagaatattcgttgaaaccccgataagctcattagtccaattcaataaccgtatgttcttgggtgcgaacagccgggctgtgactgccatgagatacattgttcctagggcgtacgggaacagggcccaaagagccttcagccttgcgcttcggagagaaggggttgtctgtcacaggcgagatctcatcagtgtcgtacttgggggtccaggttccatcgactttgatctggattgctctaatcccatcgagtccgttcgttctagcaagctgggcgtggacatcgacaaggaactgatcaacgaccaagaactgcgggcgtgcatctcccttgcagatcgggcagcgccagttatcgaccatcggtgtcgggccggatacggaatttctggttcttataaaagtgtcacggtcgaagcattcgtggtggaagcaatagcgcgagcgaacgggaatatcgaagatgcgtgccatgaaagggtccaccaggtcgatcgtgaggttgtcggtgaccacggccaaatcatcgtcatcggtggtaggagcaagacgctttttgatggctgcacgagattcggcagctgggacggattggatcaggctgagtatctggtcgaactcggcaacctccatgacctccaccccgaagacgaatttggaggtcttacactcatcctgtcctaagatcatatcgagccgtacgctgttttcgcctgttttgatgtactcggtaatgtccaaaggcagatcttttccgttgtgaacctttcggcgcacatagagctctttgtcgttcacgctaatatagaagacactgggccagaaagtgttcgcagtacaccaggtcttctccgccacagtgtccggattgccaggaagacgaatgcatcgcaggcgaatagtccggcaaccgggcctaaaggtccaaaccgaatgttggctctgtttcccgtgagctatgtgtgggaacttttggcgctcatcatgcgtgaaagagaaattccatgtgtagattggctggtcaacgttgacgatggttgggtgtacaacgaatgttttgagataggtaaacaaatcagtctcgatgtcattaccatccgaaccctgttttaccagcctcttcataggatcgcgaagatcaaccagatgtagaccgagacgcgttggatttggattcaccgtcataggtgctctgtagccaggtaccgggaagaaagcagagttaagcgaaggctggtgatgctgtccctgagccgcacgtgtgaccggtgaagcagacgactgcaaagccgtcgaatgttgtcggttatgatggttattaggcctttgtggtggcatcgggtgctgggccatgtggcttgttgtagtcggcgtcgtggatatggacgatggagcatggagcaattgcgctgactgtgtaggggtgagagcacttgattggagggaggggttagcaggcgatattggagtcattgttcgaccgtgtaattgttgactaggtatttgttgaccatgtgagcctggcagtgattggtgcctcggagaagatgctacttgtccgatcgatgtctgtatgtgcatttgcatctgtgggttcatatgtggatttgtatgcagatacatatgctgttgctgattcatatgtggactccccggataccaccatccgtgttcctgtctcggcccttgcccctgtggtatgggattgtaatgagattgcggggtattctgcatttgtgggtttacgccagattgatagggcccagcagccggtccaacaacctgaccccggggggaatttgagggaagctgctgcaaaggtgcaccaattgggcttggagcaggtgaatttgtggcaggttgactgacaccagcaaccgaagatctgggataggaaggtactcctggagtagcttgaggcatggctcgattctgaggtctaggaggtggtgcagagtgggaggatggtgtttgtggtgtttgtggtaggtatttaggcgggaagctgcgatactcttggacgaatttccagttgagagcctgctgagtggtcccgggaagtctagagtccctacacttctcaaaagcttccaaatctttccaaaataacttcagcagggcatccatgtctttgtcatggtgaaggtgccgtgcaacacacgtgaacatcaccgacatcaaaatctgagatggacaagcgagtgactgccaaaggtgagataccaacgggggatgacgagcctggtgcaagattccatgccattcattcgcaagccgtgctaaaaactcaggaacaccagacagcacctgaatgtaccagtttgtgtgcatcaactgctgtggagatgccgggaaatgggcaaatccattggtagcgccatcatgcatctttgcattatcatccagaataagcctgagcaatttcatgcccgcgttggggactctaatttgacccaatgtgcttgcatccgtgctatatcggcagtacaattgatgtatcaccaaatagaaagcatccttacgattaatggcctgctgcaacaggttaatccgaggccgaacaatagtggtctggctcaagtgagcagggggtaatgctccctttgcagacaaatcgtccaccaaggcattcaattgagcagaccattgttcccatgtctcattggggatagccgcaatcccagctcccacattctggagcggactaggtcgtgaccctgacactgcgtgttgctgtgtgctagtacctgtgcgtgtgtctgtgagcgagggggagtctggggggcgatccgctcccattcgagaggactgggtcacgcgttgtgacgcggtgagcccgctcggaggaggttggaccgccatgcgctcatcatcgccacgctgtgccgtgagttgtgtagagattggcggcagcgtggaaggtctatctgagatgatcgcatcggcgttgacgggacttgggtgagaatttgtactgagaaccggtgagggaagagccgtcggtcgcgtgtcgggcttttttgccgcatcaacaggaccacgtgcgggaggttgggttagggtctcaccaggcgtgacgggggacattaagacagtctcgctgggaagggatttgggagggactggaggatcaacctcaacgcgaggttttcgcgcggccgaattctccggggcgttagcctgcgggcccatccagtgtctccgcacgccgcctaagaacagactggcagtagtgttggactcctcaatatgatctgcactagcgagcgatcgcgatttaggtgataccatgatgatcgagtaagtgtctgaggcatcaggatgatttggaggttcctttcaataataaagggcgcttacaccgatgtttgattcaaagaatcccagacacctaagcgcctagagaccataataggaatggatccatgcagttgagagtgaaagcgcagtaagcagggggagatgttgcgatagtgacggtcattcgatatgtttgctatagctatcctatactcgattcctctggatctgaatctcaagtgaatctaatccaatctaatccattctaatcctctaatatagatcgggtggacttgggcaagaatgaccgggttcatctgcatacaaggcacatgtacttctgaagtactgtacgaaaacggacctaattgcccaggtatgttgctaattactattcaagctaagcgctaggtagttggtacttatagtgattgtaatcgcaatccctatattatatgtaatcgcagttgtgccacctctcagctcctctccctcaaccacgggaaagtctcccaagtccagactttcttacaatcgcacacgtcactctcgcctttctcttcgaatttgcgtcttaggtttgatattgattcaaatccgagttctgtcaataatttaccaatattcttggtcgcgttgaaaaaagaaaaaaaaaagaaatccaatctatctctacaaggtcgagatccttcgttcgtgctcccgagccccgcgagttgtttaacctaatccttctaatctcccgaatctctagcctttggacttctcacattctctcccctttctcttacccttccgccaaatcacattactcccgagtctcccccagtgggatacgcaattgcaatctgcaatttgcaaatctatccccaagggtgccatgttttgtgttggctcttgactaggatacacggaatattgagatggttaccatgggcccaccgaagggtgttcgtccaggcgacattctggaggttcttcgtaagtgacgtcgtgtgcgacacctcgatttctgtgactccgcgtttttcaggatgcgcccggcttctaacactccaaactagatgaatttggcgggcgcggagaagacgaactggtcatgttaccccgcgacaagattaaactgatcgagttggatgaggaatttggagatgcctggtactacggacagaacctgaggacgggacaaactggtctcttccctgcaagtatgcgccccttccccaggacccccccccctctcaccacccccgactatgatcccaactaatatttgttgcgcgacagactttaccaaagtgggctccccaagaaagaccctcgccgagtcgccagttctggtagaatcgccgatccaattggaatccctcgcgcgcccagattcatcattcgcatcggctgagagtggacagagcacccctcaagcatcgcgccacgttagctccgacgatatgcagtcaccgcaaatcagttctcccacacagcatcgatccgcctcgtctccgctgcctcgccccagcctggcggccgatattcagcaagcctttcgtggatcgatagacaatcatttgaacggcgaagaaagtccggtcatgaacgagaccttgagcgtcattgacgagcacatcacggatatgaacaccccacgtcacagcgtgtcgacccaggaacccaggacgatcaacgattccggcagcgagtacagcagccatatcggccacagggcttcttacatcaatggaaatgagaccgacgacgaggagcagagtcttccaaccgagcaagaggtgcggaaatggagtccaacacagacctcaagatgcttgcgcagccttggcattgatcaaaaacactgtgacatctttgaagaacaagagatcaccggtgacgtgcttcttgatatggatcaagattttattttcatgaaggagttcgattttggagtcatgggcaggcggctcaagacctggcacaaggtcaaggccttccaagaagagaccaagggcttcagtcagcagcaagccccaagaggctctatctcctccaacttctcaccttccgatgaacgtgcattgtctcgcgctggacacaccggaccacttcttcctcggattcctaccttgtcagaaaagaccggcgctggttatccacgaggctctgtgccggtgcagcacccccgactggccagcaacagcagctcccccatgacaccgcatacccctccgtacagccatgaatcaacgagaaggatttctgcggcatcgctccgtgatctcaaccaagcgcgtcgtcattcttccattgacgccacccaacgaggcatgcctgattcgggttttgttggtcaccagcaaaagaaaccctcattcgaccggtcctggactctgaattccggcccccaagccatgcccgctcgcccaggaacctccgcgggcactagtccgggtggcttccggaatggaccgctgaccgctgagtcagattcttacaactcctatgtcaccaccccggatcagattgaggacctagatcggggttatttctcgggaaccgaggttgattcgcgccgggcccgccgcgttctacagaaacgggggtcggccggtgtcgatgtaaacaatcagtcacgaaagtcaagctacgcagatgattcataccaagtgatatccccagcgaagcgccactctcgcattggcagtgtggactcgatacgtgacgcagcgaatcgtgtctcccccgcggccaaggcctatcacggcacgccaccgaagagtcggctgcgaagcttgagcacgcgcgtcttaacggataaaagtggaaccagctctcagtcgtcaaccaccgatagcaaaactagtaacggtggtggattcttcgccaatttctctcgtgtcggtggcaaaggtgattcggaaattcctcgcgcttcgccgttgcaattccagccactgaaaaatgccgggcccaagtttcgccgagccatgggccttcgagccatatccgacgttgctggaaagaagcttgacacatctgcgctgcctgattcgccgctggagtccgatcctacctctgctcgcactggatccacaactccatcggcgacgtccaagagctcggaacggcatagtacagatgggtctggtaaggccaccactgacggacagggattcgtagcccgtcctcgaacggccaagtctaagaaagagactagtgcctatactcggggtcttgagaagaagacaccgcaggagcaaatggatggttgtgactacagtggatggatgaagaagagatcttccaacttgatgaccacctggaagccccgtctgttcgtcctgcgcggtcgtcgtctgtcctattactattccgaggacgacaccgaggaaagaggcttgatcgatatcaccgctcaccgtgtcctacgagcagatcaagatccgatcattgctctacacgcaaccatcaccggctcaaccgcattacctgccaatgccaacaacaccgtggatagccctagcgggacgaaactcaccactccctcggtcatccaatcgctgaccactaaggacggcagtgggccgttcttcttcaagctggtgcccccaaagtcaggcaactcgcgcactgtgcaattcacaaaaccagccacccactttttccaggttgacaatgtccagcagggtcgtctgtggatgggagcgttgatgaaagcgaccatcgagcgtgacctaggacaggcagtggaaaccaccaacaagcaaaagactattagtctaaaacaggcccggctgctgcagcagcggccggcagatcttgttcctgcttcgggtagcaccaagaccgcgcagaccatcgatgaggaagaggaagaagcgggtctgcaaattgagggtttgaacctcagtcagtctgatgttaactctctcgaggacacgaacggcagtattgatattaacaacacagatgaaggcctcgaacgacctatctccaacccccttggggatttggataatggccagtcgtccttgcttccggatcctctagccaagacggaatctaagtgaacatttattgcggcctctattatttgagtgtgaccttgcttgcaattatgtgaaggacatattttgcccattcttgtttttttttttttttgctggcgtttgatgtgatatacccctcgctcagacttcttccctttgttgactcggcccaatttcgtcattacaggtactttggtcgccgggggatttatgtgggagtatgtgattaacttgcttatcgacacaaagttgactggatctgagcgttcttttctattaatcgcgattgcaaatgtagataatacaataattcatacaaccatccatcccatggatggctaattgcttctaatcctcatttccatagttcccaccgcccagtataccgccaagtcttagcactggcagtatatagccaccatcctactaacattgtatacaaacagcttaattgggatatctttgatactagatcatcaatccttggatgggactgttcaaaatgtcatgactataagttcttcttttgtcttgggtacttcgatcctatagcagatgtcaccgtgtatatgtgcgctgtctttatcgattagcgtccgcacttttgtttcttctccttttcaccattaaagacaactcttttcaatatgctgtataggtctttataacatttattcttttcctgtcattttagattcctcatgttcctccgctggctgctctcccgcacctttgcgctccttcttccactcacagtgatcgccactgtttacctctatctctacccagtcttcaacggatgcgcctttcctctaccacagtctacctcacggtcgagtgagcagcagctataccataattcagtgatcaacacacttctccaacaccttggcgtttcaacctcagactcaaacagtcaacctgccatctttagactcctagtcctcgcagacccccaattggaaggcgacacctcgcttcctctccccgaatatgaattatacccccgcattcagactcactggcgcgccatccaggaagcaatcgggaacgcctccacttcacctctactggacgaggacgtcctctcaaacattacaactggtctccagaccctcgcaaccgaagacatcccacgcgccttcaaatcaggcctgaaacgcatcgacctctttggcaacgactactacctcgcgcatatctaccgcacactcttttggtggacccggccgacacacacaacggtgctgggcgacttagtggggagccaatggatctccgacgacgaattcgcccggcgcagacaccggtactgggaccgcgtgttccgcggcggagagcgagttgacgacaacatcaccagaaccggtgctgcgggttggagccagagcgaaggcagcaatgcgccgccattagaacccctaggcgcggatcgggcctgggccaggcgcgtgatcaacgtcgcgggaaaccacgatattggatatgcgggggacatcagcgaggcgcggatggagcgttttgagcgtgcgtttggccgtgcgaattgggatgtgcggttcgaacacccgcccgtcttgtcctcatctgggtctgctggagaccaagttgttacccctactctacacttgattaacttcaattccctcatgtttgatacccccgcgctttctacggaggttcagagccatacgtattcttatctgaatgagcttatcgccgatcgagtctcgccggtcgaggaccgatcggcttttactttgcttctgacacatatacccctgcacaaggaagacggcgtttgcacggacgggccgtatttctcatttcgtgattctgacgacaaggacggtcccgacggtgtgccccggtggcttaacggtggtctcaaggagcagaaccatctcagcgacacactcagcgctagcgggatcctgcaaggcatatttgggctgagcggcgatgagaatgcgcttgctggtggccaaggccgaaacgggctcattcttacggggcatgaccacaccggctgcgatactgtccatttcgtcaaccgcactgaaacagtcggtgacgacggttcgcctcgatcttgggagtgggctgcgaagcgcttcaatgagagccagcacattgacgacccttctatccgggaggtgaccctccgctcgatgatgggagagttcggtggtaatgccggtctcctttcggcgtggtttgatgaggtcgctggcgaatggagctatgatatcactatgtgtccagctggcgtgcagcatatctggtgggcggttcatatcctcgtgctagtgacgctaggcgtggctctgcttttgttcttgtctggtaatgctcagccgaagacgactacttgtaacgtccagtcagaccagaagacccaaaacagacagaagaaataattgggtcgtagaactgtgttttcctgtattaatagcattggatgaccgagcgtcttgcatttggatacatatattgcagactagtactccgtatatattttcaaaataccctcaatcagatatagaagtgtatgagttgacctttgttggagtcatgccttgttgtacagttgcgtagagatagatccgtttacagaaggcatataaaggacctacgaagggtctacgtaaagccattggtggtcatatcagagttcatatatcggccaaagaacaaacaaccaggaccaggtccccctcccatacagctcgcctagagcctctaggccagccctcgaggtaatgggcaaggcgttgcgaaaggatgtgattattttaaagtaatacttccgagagtcgccagcaaagggagggagaaaagacgaagatgggggatggaaccggctttaaaataaaaacagttggatttcgtcaaatggacaccacctgtccagctcccattttaatcctatggtctcatatgcaccgcattccaggtcccaagcagatttgaggtttggtatcgttctttttctttaaaattcgggttttctctctttacataacgacaccggagttggaggcaatacgctggaaaagaagtgttagctttttgaatgagagcattcgggaatggaaaaggaatccatttcccatgtggaagtgtataacgtacgggccagagctcagcagcttcctttccgacgggaccggtgatagcggaacccttcatctcacccttggcgttgacgataactcctgcgttgtcctcgaagtacaggaagataccgtcggggcggcgccaaggcttgctctggcggacaaccacagcgggcatgaccttcttgcggagctcgggctttcccttcttgacggtggccatgaccatgtctccgacaccggcagcggggagacggttcaggcgggcaccgatacccttgacggagatgatgtacaggttgcgagcaccggagttgtcgcagcagttcatcacggcgccactgtttgacgaaaatagacccgttagtaaattgttctagatcttgaagacgtcgtgttttcgaatgctgaaagtggagatccaattttcttttcctttcttcccgccgatctttttcgtttgttgcatggcgagtgttttttctgatgacgtttgatcgactgaaaatgacatgtgggatccggcgggcaagaaaggcgcattcgaaacagactagacgataagaaattggtagacgtacacaggcagaccgagagtcatcttgagcttgttgccggcggcaccgccacgactgtttgatcgttagtaatttcctctttgtcgattcgttcttttcccaatccgagccccattcgatcctctcgacacgaaggtgttgtgttgcttgtcgcttgcaaaattattctgtatcggttcggaatcgaatgggaccacgtagggaatcgctggaagactcaccctctcttagacatgatggctgatgatcacgggggaagttggtgaaaaaggttggcgacaagaggtcgaacgtcgaggatctaaaccggaggtgtgctttctcgcttagtgggcaaagtgcgtaaaatcttggcattggaaggtgattggctgttcagacccatcagctttgccctaatactaacccgatctgggatagtgccaaattttaatgcctgaggcataaactctatacttctagggttcagatgttgtgacgttttgaaagattgcatttcactgaatagtacatttgcaaaaaaaaataggtgaaaggaaaagcagatagcacagggatgaagataaaatatgagatgattcattgaaagtccataaaagcaacccgccatcccctgaaatatttcgaggttaaacctcgatgtgagtctgctacgagtaatgccttcccagtgccaaacaagattcgagcacgctgttaaaccgataacacctttctgccattgtccgttgcgccagatccgatattgtcgtctttgcatcacagctgattactcctctttcttgggttctgtcttgtgttccaagctctcttccttggtggccgttgcctcggtgtccgcagtaggagcagaggcttctgcagtcctctcaagggtagagtcggtagcctctttcgtaggggattgggcccgcacaggggaggcagtggagccctcggtcactgatttctcctcaataactgacgcttgagccggagcttgttctgatgtagtagcttcagggacagcagaagcgtcctccatggtagtatcttcatcatgagggggaggagactggtgttgagaggtagtagaggcttcatgctcctcactttccatagccatgttatcagcatcagtcatgggcgtttcatcagcgtgcgaagcttctaaggcggcagaaggcgcctcgggttcagtgcgtggggcattggccatcttagtatcaaggccgaaatccatttctacatcaaccgtagatgagccatcttgcggggttgccatgccactatccagcccggagtccggctcgagatttcggtagttgacttggttgcgacgccgcatgacgcctggttggcgacggataccgttggcggcgttctcgtcttcgtcctcgctgtcactgagctcgccagtcttttctgtgcgctggtcgaatcgtcgttgtgtgaaccgcttgtctttgttttcatcctcatcgaggtcatccataacgtcatcagcctcgtcgtctatgccacccacgatagggttacgcggtacatctgtcatttgaaccgaaggagcaaatgccgtgcgcttcaggttttcaacaacctggttgcaaatcttgtccaggtattctctggtgttggcgttgtccatgttggaggggcggacatcgagctgataatcaggagcgaagtactaatgcaattagtaagtgttatttgatctggaagatataagaaacttacctcatagtagtcattgtatggcagctcagatcccaggggctgtccgacaaggataccggtctcataagcccatgttcgtgcaacgttgcgcatggtgtagccaccaccgccaacaaccaaggttggcagatcgaaactcttgacgaagttgacacagttggcatgtcctcgcatactcagattgaagcagcccaagcgatcgccggatagactgtcaccaccgcactgaaggaccacggcctcgggacggtaccactccatcacgctcttaatgacaggctcaaagatgctcttatatgtgacatcagtgatgccatcccggagaggaaagttgactgcgtagtttttgccctgcccgacaccgatgtcgcgaagctcaccagtaccagggaagtactcgccgtacttgtggaaagaacaggtcatgacgcgatcagtcgtgtagaaggcctcttcgacaccatcaccgtggtggacatcaatatcgacataaaggactcgctgtttgaagcgcagaagctccagaattccaagaacgatatctacatagatgttagcttctgagacagatgcttggagaccaagggactataccattgacatagcagaagccactcgcttcgctcttcttggcgtggtgaagaccaccagcccagttgacggcaacatcgcatttgttgcggttcagtcgcgcagcaccttccatgctgcctccggcgctaattccacagaactcaaagagaccgtcaaacacggggcaatcgtctcctacattgtaccggctctgttccttcacgaagtggtccatattgtccggtgtgaccttggacaggaagtcgatatattcgtcggtgtggaactgggtcatctcgtacttggaggcaggtttcgcacgctgatttattagtgcaagggtcaaacaaataaaaataggagagtgctcacgtagatctccattttcttatagaggccatagttcatcaccaagctgtgtgtcatgcgtatgcgatggggcttcatggggtggccggatacataggcatagttgcccacatcggagtcgtagaagtaagcgactttcttatttttagacccgagaagcctatcagagataggttccaaagccatgttgcagagagcgctgatgattcacgaggttgagagtggaaaagagagtggaaaaagaagtgaagttcaagaagtgtaagtgagatccggggaatgaagtagcgaagttgcaggcgcaatgcagatatgcacccaagaggttgaataggcaacgatggcacctattgtcaccagatcccgcaatgcgaagattaggtagcagtacttaatcacaatagcaagccaatgtcattgttcacgctattgaagaatagattgaggagagagattcgcccgcgaaggagcggaagccgaccgaaccacacaccgccttcgtcaggcaaagctcccacggctttgctcatcatcacttaacacgtcttcgacaaccttgttatcttctcgctaaaatcacatctgtcggggattttcgctaatttgtatctctctttgaacgctgttccggaaataccaagctactagagacaaatcgatttgctccggagctcccaaatagcgatagcttcgtcctctctactctcgtttcatcaagtcttgtcggatatctcttaactatggatcgtcttaaccggatgctccaggccgctcaaggcatggggatggggggcgctgctcctggtggtgtaagttggataagactaatctccttgttggaaggcattaatggcaacatcctagcctagcttcaccacgtttctctacattgactaatgagagccgttatttaggatactccaaacctgatagataactcagaaaccgtccacatctcctccttggctctgctgaagatgctacgacatggccgcgcgggtgtcccgatggaggtcatgggcctgatgctgggcgagttcgttgatgaatacacagttcgggtagtggacgtctttgctatgcctcagagcggtactggagtcagtgttgaagcagtggaccccgtgttccaaactagaatgatggaaatgctgcgacagacgggacggtaagcctattagctggtatataataggggagtcctccatgctgatgatttcgtacagaccagaaactgttgttggctggtaccactcgcatcccggtttcggctgctggctctcctcagtcgatatcaacactcagcaatcctttgagcagctcacaccgcgtgcggttgccgttgtcgtcgatcctatccagtcagtgaagggcaaggtcgtcattgacgccttccgtctcatccaacctcagacagtggtgatgggtcaagagccccgccagactacatcaaacttgggccacctcaacaagccttcgatccaggctctgatccacggtctcaaccgccactattacagcattgcaattgattaccgtaagacaggattggaagagaacatgttgatgaaccttcacaagcatgtatggaccgaggccttggagatgagtgacttccacgaggagggtcagcacaacgtggagcgcatgaagcagcttgttctccttgcggagggctacgagaagcggatcaaagaagagacggagctgagcaaggatcagctgaagacgagatacgttggcaagcttgatcccaagaagcgtatgtttttcccaagacccccccccccccccaaannnnnnnnnnnnnnnnnnnnnnnnnnnnnnnnnnnnnnnnnnnnnnnnnnnnnnnnnnnnnnnnnnnnnnnnnnnnnnnnnnnnnnnnnnnnnnnnnnnnnnnnnnnnnnnnnnnnnnnnnnnnnnnnnnnnnnnnnnnnnnnnnnnnnnnnnnnnnnnnnnnnnnnnnntgatcccaagaagcgtttttttttcccaaagcccccccccccccccaaaaacatagactgacgctttgcagacatcgaggacgtaagccaaaagttgattgaggataacattgttgccgtctcgcggcagatgattgacaaggaagcttcggtggcacggcagtcattcaaggaagacacgaacggtgctgccatggaagttgatgaagatctctaaagagttagaaaagggtgccaatcaaaccgcattaattatttctgattggttggactttatgttaccaaaccagaccaacagatgaatgaaatctactcgaattttcacataataataagaaattcattgtcaacaagaatggcgcttggcctattgttggaagtaagtgtacctataattctgtttcatgggatctatgcggcgcgcaatatatatatatatataatcgtaacagtatgaataatatccaccgaataatgaactatcaagactccaacttgactgtctgaagcgagttgctcaaggcttcgagaacactaggggagtaggcccgtaggccatcaaaggcaacatcaacgtcattgtgctcatgtttctcgtgagtgtcgtattgagtgtcgtattcagtgtcgtattgagtgtcggtccagcctctatcaggaccccaaaggacctttttctgagcatctcgagtttccgtaagcaagcgagtcatcaaaggtccattcttttctacagagggccaggcatcgaactcaacctgaactagacccggcagccgttccaaaatttgatgtaacaatttgccacagaagttggtatagtaatccttggagatacgaaagccctcgaacacagggtgtgaagggtcacactgcacaaacactttcaacgtgcgcacaagctccatgtcgtgtaagcccaagccttggtttacaacccatgacttcgggggtgcagtccagcttgatcccacaataaattcgattgtggtgatcgaagagcggtggcgtggaggcaaagcccggatcgtgggcatgcgcaagaaatcctggatgggaaacacacggaaggtctgggttgaatagaagtagtgagtggcttcgtcgtggatttgtctcgagacaaggaacagggcgatgcggtgtgagaacggcgctagaggtttgctcttcttcgccgaagacccaacattgccaccagtgcgtttcgatgcactctttcgagtcggcgtgaataggacaagattataaatgcgcaggcgaatctcagacggtagatggaggaagggaaattgcagtaagatcggaggttcagcgtctgtttcggattcggcgtcggaaagttgctcctcaaaacggagcatgttctttttgaaccccatgattgaaaggtatgtagatgaaatttatgggatacaggcgagtctagatttggacaggaagatcatatttctggtaaacaggtagaaagagaagaagaaaactaaaaagatttgtgtcccacgatcggagcgcagcttcacgggtaaatcctttgctgcgctcttggtagtgggaatgaagaaggtcttcgttggtctccccagctaatacaacccggcatgcagagagaagttgcttgataggtcaaattaatgtctgggtgaactttctgaagaagaaaagaaaaaaagaagaagactcggtggccgaggatgtcgatatataaacaacctgcacggatggttcgggtccaccgccgtaccgaatcgcgccgacttttaacgggagaccgtggtttatcccatcattcagaacatatttgtttcaacccaatacacaatgcttagtcgtgcagtcttgcctctaacgaggccaaatgccttcgcatctgccgttcgggcatcaaccctgtcggcgcggccttcgttgtacgctgcctacaagctttccccgggtatccagctaagggcgaagtcgaccaaaccgaagtcgaaaacttccaaagcagctccgaaagatgctccgaaagacttcgacgcagagcaacccgagtttgatacaaaagctgaacctacacaaccttctgaacctgtgaggcttctttcaactttccattgaaaggaatccctctgacgttgtctttctaggtcgaacaacccccacagacgcctcttcccgatctgacgcaaggtattccatcgacgctagccgcagaattggaagggcgtatgaagaagggaccattgaatctcacagaagaccctacccagtcagaagattatggcgcggaaggcagaggtggtggtgacatccccaaaggcggatatgagacatccatcgaccgccgcaaggcccgtatggccaatatagtatacgcagtcatgttgcttggtggtgtcgctggtatgggctatttgggtcgcaactgggaaaccgaagaggagcagcggcaacaccctgagattccgtcgggatggagcccgggtctttggtacagccgtatcaaagcccgcaccagcgatctcaccagctattacaaggaccctgctttccccaagctgcttccggatgaggacgccgagatgcgtcagccatacaccttggtgctcagtcttgaggatctccttgttcacagcgaatggacccgtgagcacggatggcgcgttgcgaagcggcctggtgtcgactacttcctccgctacctgaaccaatactatgagctcgtcctgttcactagtgtgcctagtatgatggccgaccaagtcctacgcaaactcgacccttaccgcatcatccgctggcccctgttccgggaggcgacccgatacaaggatggagagtacatcaaggtatgtattcttctttcccccccagtcatataatgctaattgtctgataggatttgcaatacctcaaccgcgacctttccaaagttattctcatcgacactaaggaggagcacgcccgctaccagcccgagaacgccattattcttgacaagtggactggagacccgaaagataagacgctggtcgccctcatccccttcctggaataccttgctggtatgggtgtcgaagacgtgcgtaccgtgctgaagtcgtttgatggcactcccatccccattgagtttgccaagcgtgagaaggcgatgcgtgagcgctttgagaaggacctcgccgaggagcagaagaagaggccctcgcgtggtctgggcaactttgctgctgcacttggcttgaagtcttctgtcaccctgaacggcgaacagacaccctccgagggtctggcgcagggtaagatgctctgggatcagatccgcgagcgtggtcaaaagaactacgaaatgatcgagtcagagatccgtcagaacggcgagaagtggctcgctgagatggcagccgaggaggagaaggcccgccaggagcagatgcagagcatgaagggctctttcaccggcatatttggtgctggctccaagaatgagtaatcggcgcaagccaattacttttctcctctagcagatcatcaggggtctgtttaatgaactagtgtaaaataggtagggtttggggttttggatttttgtacaaaattttagtcagaaattttaatatgagaaagactgagatttggactgatatcgaggtcgttgggctttggatcccagggtatattgttgaaataggaatctagaaatatatgttcaatgagcttttttgatcatgtcaggttcacatcttggaagacggagacatcccatattcctgtcatatcaaagggaaaaccgtccatcgttccaaaagtattcgatatcgacatcatgtcgtcaacgatatcgttatttgtttgggtttctggcagcgatattgcggccgggttgaccagcccgctgtctgccatcgcggttgtgaatgcctggtccattgtggcaccagttccgggaagtcggtgcataatgcgttcgcagtggtctaggcacatgtctgctacatcccagtcttcttcttcccgcacacgacgcaatactgagcgcagggtttcgacgttggaaagacaggatcgtgcaacatcgctatcggtggtctcgaatgcacaacgaactagcaatgtcgccgttgacgtgagatgaaaagcgctatctgtcaagaagattaggaacaaaaagcgatgtatagaaagaatacttcaacttacagggtagccagaactcagtgaaattatcttttcgcaaagacgttatgaatccaacaatctcctctgcagaccttctgcattccgtttggaaatagcgacgtgcctcggtgttttccgtttcagagttgttgacttcctgcgaggttgttagaaaccatcctttcgattttcccgctcctccggcttacatttagttcaactcggctgacaagcattttgacggccaagaaagccagttgcaagctgcttgctccatatatccgttccccggtatggattgtgggtcctctcaaccagtccggtagtgagtcttcccatatatctaaatctgttcgtatttgtctaagcttcttggatgtctcgcgtgcaggtttgtgttgcaacccataaaccagtggcaacagctcgcctaaagtctcggtcaaccggcataggtagatgtgacagtgtgctgctctcacacgctctgtagtgcggaggtttgatgggactaatacctctacggtgggtagaggcacgtcatattgatttttggaaatctggggtgggacaccatgaccaaagcttcccctatttattgtcaggtttgttgcaagccaaaagaaaaaccgaacgagcttaccaacgatcgtgaatcacaaccccccaccacaggcgaatccgctggtttttttctgcttgtgagagcttccaattgctaggatcacggttcaagccaaggcaatttgccaaagataacatgcggccacagctgacggcgttgccagtcatggagaaaatgggtcttcctgttaggtcgatcagcgcggcgctgattgtgtccaatccgggtgctgagaattcctcatgcaacgcggcgacagtcatgttgatcgcatatcgtacgtcgggcttcggatgacacgcaagcttttgggtgtgtttccaatatacgagggacatggaatagacttgacacactagtgcagctggtgggtcgtgcaggtcatcggcgatgaatgattcccagaacgattccccgtcaaagattggaaaagaaacgttaaaacgatcaatgaagctagagggggaaatattagcagggtagaaaatggaaggaaaggccaatggtcaacatacagtctcactaggtcgtgtttgaagggcccgagtatttgttcgagtacctccttctggttctcaccaggaggcgttcctttccgcatacctttccttcgccgggagatggtggtgtaaaggactggtttccgtgggtcgctagagtagatattgtacgggtggctgttgggctcttccgattgactcgaccgctctgggggcatatgcttttcaatgacttgggcatcctcggcaaccatagggccaacaatgagaactgactcattctgaggatcatccatatctttccgccgcagatcactttctcgacgaccacccgacgaagtcgttccatgggggctcggcccatttatcggctgccggggcgggttattttggcccatgtgggtgagttcatctgaactacgtttacgcttatgtcccggcatggcctccaacgatggaggccccggccaggatttccggtccgcgccactcaaaaccgaagcatccgcgttggcttcctcttgatagtgacagtcggcaccttgaacgcgacatagaagacaggattgaccggggatatcgacggtacatcgagacttgcgcttgcgacacaagtcacaggcgcggaccttatgggaacggtacggtcgggcgccggcattgaatccgggagatggaagtttggacgaggaattgacttgaactggtgcaggcgacatgatgtgcacccaagtatgaggcagttatgccgagggataatacggggaaagcgaagatggtgatttggagattttggtcggggtgttctgggagtcggccgattggcggttggacaaagtgaggggtatgagcacgaggcctgcaaggtagggagaagaccagatcggaattgggagctccaaattggctggaaaccgtacacgagatgtcgaggctacatgcacatcatattgtgcaaaggaggtccccccagatatcagaatccggcgatctcattttcttatcaaaaattgaactgcgggcatccatggatccatgtggggaatgctgactcatgccacgtgaaatcgctgacataatgactttctgcctcaggcgcgttctatttttatctttggacttggcgtgcgtagacaataatgcaggcgatcgacatgagttgtttcattgacattggtgtcccgcattgccttatggggcaagaaactgcacagccacaaggtcatctttttctcaacaatgtccgcggcgagcttgatctgttgtatgtaggtcgagagcggtcatcatggtggatacctcccctttcgaggactctttcgtccatcaagcgggctcttctgtatcgcccggcctaaagacatactttgaccggctaccacttaacgtgattgagcagtaagtttctatctcaccaggtagtcgcaaccttgtgttcgtccgacatgtggccttacggtcagtcattgactgcaattctgactaagtcaatagtatcctgtatgcgtccgatgccaatacatttgcatcactatctctgctaaaccgaagatggaaacatgcgtccgattccgcggcattgtatgcctatcaattgtctcgctgttcatcattttcctgggctcgcggggtcatttctgaggcagaaaatctgactaaactcaagcgccaatttgttaagcaggtcaggcaaaacgcgtttgatgcatttttacggcctcggcaaactctcctgcgattaatttcaagttctatgagctcgtcgatggccttcccacagggtgaagtttttcgattctcattttcaggaaatggtcaaatggtgctctgcatcagctcttctcgcattgtcatactagacgtggccaccgacccagtcgccgtcaaacatgaacttataactcgaaggcggcccctaagagccgcaatccgtgatgacggctctctcattgccgttttgtcctccacgcatcgagttcatatctacaagctctctgacgatgaagccaagcacattcgagttatcactctggatgatgctccaagatatattaaattctctccatcaggtagtgtgctagccttagcctttgaggatagtattgaggtatacgctgtggctgaagaggctttgtcgaccgaccgtcgggcggtgcgttgtcaccgtgtcgatgcactttcattttcgcctgacggatcgatgcttcttggctttacggctgaaggtatcgtcaccatcactcctccgttttataccgagactggaacggatgcctcacccgaagaactcgagatgcgaatgtggacaacacaaattctcttccctgagacaattagttgccctatcactcacgtctccctgattgctggttatgaggaagccgatgatcactgggtgatgggatatgacaaacatttgggggcgttcagagcaatccaattaaacaagaatgccggaatcgtttatttcgccagtccattcctcgcagatgaatctcgggaaatgcaaccaagcatgagacccgccacagatgaaactggagagctttcagctttagggttccaagattcagaactgtggatatatgggatgcctggcttgggtgctagtggaatcactgatacccaggttggtggtgatcatcattatggaggttgcgcgcctcgcgacaatctagcacagcttcagaagatctttcaacaacctaagatcttgatacgggggcggcgggtgagtgacatgcacgggatcacatccgctcattgggtacgttcggattcaaaatgccgtcggagactagtcgcggtagcacctggtggtgtacgaccacagaaccttggccgagaagatattccagttgatggtggtcgaatcctcctccttgattttgagcgctccaccatgaatggtgaaacgactgagcttgacatcgaagttggagaaacggcacccaagattcttatggagccggactcctctttggccacggaagttgagcttgaaagaaggcgaacacgactacatcgtggcgatactgctacaagattcgcggatcttggccattcagcgactactcgagaatcccgagctctgccacttcatttccgccgcaacagtctcgcaattcctacctcgccaagcgagacttctcccggcgatataatcgaccttccatatgacaatacgcagcctcgttccagtgaagttctccatcgagctgccactgtggctgcatcaacccgtgggcgatatgaccctcgatatcgtaattcccacgcccctcgacagattccccatgagagtgacgccgataactgggtgccaccccctcccccctacacagcggatccattgccagatggtctaccgagaacgcctctttccccagtcaatgttgtcgattctgtcccccagcctgaaagagaagaaaccgctcgtgtcgcgcagcatccaacccgcccacgtccacaatctgtcaatctacaggggctcggcggtatgactggcgccaggcgcaggggaagttccatcggcagagacttcaacccagatcaattaatcccccaagattctttcacaaacaacttcgcaccacaacagcctggatctgccttaaatccacctacagtgatccaacctaccacgcctacgtttgctgtgtatccatccgaaccactcctacaagagagcaacatgcctcttccctacttgaggtcctcggcactgggcgatgcacttggcgatgcctactttccatactctgtgtcctcgccaaaccttctccatatcccacagccatatgaagacgggcagggcactgcagcagatgacgagcatgacgtacctgagaggcaacggtctttccacaggcgagtctcaaccgaaccctctagcttaccgccaccaacgaacgaggaatggcgtcggcgcattcaggattggaacgataacacaattaaggagcggagccgtaagcgaagggggaagtgcactgtcatgtagcctgttttaccatatatccaattttcccgtctagaataactgtcaaattattaaaacaaatatttgtttccagcataatagtcatatcttaccacctccctctcatccgaggtcaaccgctgattcgttcgctcccaaatcctgctccgaagtcgacgtagagggtgctttcctcttgtagcccgaccttggaaagaccacgccaggacctcacccaaatgtaagtgaatcatcgctgtagcccgttggtggaatttctcgtatgcatgttgcaatctttccctcggtttctttgtgccgaatctgggctaattgccgcatcggggtgactggaggggtgtgaaaagtgacgcctgtactacgctttgaatgccatgagctctgctcggtcaaccaggagggacgaattgataaactcggttaagttctcctggttcggcatgattgctccaatcctatcgtttgcgtagagggtctagagccacagacgccggttggaccatcaaacagcactgggtccgagcctctcttgcatgacgaggatggttcttgcagatctccagtctcttgttaatgctgtgagaacaacaagcattgatactgttagtcaaggtgatcggaacccgatcccattttgtcgatgttgtcagtataatctttagctggcggcctgactgtctccccatcagcaatcgactttgccattttgttggcatctaatagtagccttctctggctgtaatgctgagttcttttaagacaatttacatattgaagataattatgtctatagtatcagtagatcactcctctatacacaaagggtctttggagaaaagcctgtgctgagtcgatcctgccagcttcaactgcatgtttcctttccttcttgagatctaccaccattagaccacagctgctttttaataggactacaagatcaagaataatcacaacggaacaatattattgaattgaccgaggtgaagaaagacaatcaaaaatcaacaacaaaaaggctatgctttgtggggtatcactgaaacaacaaaaaaagatcccagtttggatctgtacaaacaaaacacaaggaacccacacaacgcgcatgctcatcccagttttaatatccccttgtaccatgtcccatgtttcatatcccatcatgatccggagaccatacaccaaagccggagtttaaccggtaagaaaggaaacactgggagcactgatgaatcgatggaaggagtcacggaccctggaaaagctagcagtcagtaaatggaaatacaaagtggagacgaccataaaataccagaattttcttctttcttcgaaatgatagttgtttttgttggttcctattcaagggcctcttttcttggatgcccgaggaggatgaaggtagaaagtggtcccgaaggttgtcggaatgtctgtccaggaggcctattccaaggtctgaatggaaggaaacgtatcgagcaaaattgatgatggacgtgaagaggcttgtccagaaacctgtttcaaggcccgcggagagaagaaacaaaggtaattgaatctgaattgagtgaatgatcctctcttgattttgttggattgacgtagaagcatgctggaaatcaacggtccgatatatggtcatggcgttcttgatccagccaaggcttgtcccatagcccagtgagaaaccacttaacctgagttgaccggcaggtggtgtggttatgataagctgagatcaaattgtttggttttctcccaatttccgtccaactgaagccgtcccgtaagctcagtggaagtctttcttttccaggtaatcaaagcctgatctttttgggaaaactgactgttttcatgtcggttgaatgatggatgcacatgaatgaccgtggggtcaagtggttggagtatggaatggcaggttcggtgattgttgtcctgcaaaagaataaggaatgaactcagccaagacctcgttaccaagaggctgtggcgaggaatgtagtacatggaatagtgttcacagatagtcgatgtgaacccaacaggattggatttgaaggcatgcgaaagacgatcaagatgtgtttttaatcgaacatctctccaggaggtcatgaacagcccgatcgtacgagattccgtttgattgttgatgcagccgagggcgaacgacactggagagaagatgatgataaactcgaagagggtaagatggtcgactaaggatgcagtcggctcgccgtggataaggattgaccgatgcgacttctgttcttcgatttaatggtcgcgcccttggactgagcctcaattggagaatgaggcacagcgaaggaatattttgcaagggtggccgtggtcgagagccgaagaacagaaatagaatggacaaatcccaaaagtgacgtgtcgcaagagagatctctcaccttaagtgaaggtgagaaatgaagtgagagtgaggtgaggccagatcttttttttgttgattgtcatcatttttttctcactgtctctttttttttgtttttttttgtttttgttttttttttcttgcatattggtcagtcaactcaatctccaacccaaataccatacgaaaagcttctgagaacgctcaacgcggccccaacacagcattgtaccagcaaacaaaagcgctgcgggacagccaagaaggacctaaacaaccctccgaagagaggagttccttcgaggtgtcccactcagacacttttgcggctggtacatgtcccagcttcaccgaagcgtctaggcaggacgctgtcgacggcgacggccgcgggactgctggggaaggacatcattgggcgaagtcgtaccacagtccgtaggagtatcaatgcccacattcgcgaacaagggagttggagagagaggaccactctgcggatcaccctgctcctccagacggccaggaacgaagaccggagccacagccgacaaaggcgtcgagctcgaagacatcgcaagagaagcactggaagcgtaagaggctaaaacattggaatgttttagttccttcttttcctgttgtgctttctttgcatcgcgacgtctctttgcttgcgacggacggcatttcctcctgtagtgccgcggggtggaaacaggacgctcatcttccgcaccgttaccagtcgattccgcagccggagcctcagaatcggactggtcggaggcgtagatatcactcgagttccaagggtgccgagaaaccaagttcgtgcgagcgtcatccgtagtgttaaccggtattatggaatcgcaggccgattccgggtccagtgacggctcatctcccaggcctttggtgatccggtggacccagataccggcaaacagagagagaaccgacacatgagacacagactcgggacaactgtctgcagccatgacccaagcaagaatttcctcatccgtttcagtcgggcccgcgagcagacgatccatctccctttcaaaggaagatgaatcatcctcggccacaaattgcacacgtgcaatctgcggttggccctcgagagccttcagagtccactcaatcaaggtttcaagaccggagaacaattgccgtgagtaagcaatcaaagcccaggggatctggacgaagcaccatatagcgataaacaacaacgtggcgacgaaaccttgcccgggtttggacctaggcgagtggatgtcgacaaactccttgggatcagaagatgtcactccgtcgcttgaccaagaggaaaccgggatgggtaccaggaacggggttggaaaccaggacggcatatcatcgaccagctcaggccggacgatgatatccgtaccaaggaaaagaaccatgtccgtcgagtttgaatacccatggccaacgtgagagcgcgactcccatacaggatgctcgcgccgggaagcatgtccgcactcggaggcaacaacgtgaaccacgtcacagaaggcccaagattccatcgtcagctggaacgtaccagacagacgccgcacgaacgactgccctggaacagtgaaccccgggatggggaaccactgactccagagagtcatgcccacgaagatccccaagaagggaatcaacatgttgaaattttttttttctgcacagggaagacaaaaagattagcagttttgtcaacagaaagagtctgagatagaaaggaattacttttttaaaaataaaattgaaaaataaaggccggcgaggccgaggacgcgggggaagcagaaaggtcacagcgcagggggcgctgttggaaagtgtgttggtaacttagggagagaagagagagagaagaaggaaagaggaaagtgaggggaggagaggctttataggaaatcctgggaggtccctgggggctcaaacggaaggtgcctgcccaaaagggaaggaacgatggacacaatgggcacaatggcacgtgtatcccccattgtattcacgttttaggaagtggcgactaccataaaaggactagtagcccagaaagcagcccagaaagggactagtagcaacctattgtcccccagggctgacgattgagcccattgagcccattgagcaccttcaatttagaatggctggagctaccgaaaagggactagtagactattcagccttaattttgatagccatgccaaggttccattgcttcaggctctaggttttcgtatttgtattcgtagatgccagcttggatcggtctcttcgttgtagaacttgcagataagtattaacctcacttgacacttgcactagagagcaactgagagatatgtacaatgctatatacattacaggtatctgtagtctgtctggtcaaaatgtcaggctttggggggcaggtgcatgtctcatgactctaggcttttgttttatattgcaggtacactgaggcttcttggctgtctaacctctcactttagatagcattatgatcacgagatctgatgttaactagctttcattttgccttcatggtatactggaattgtaactattcgtcgtcaagatggccatcgcattgatgtatccccgcgaggtgacatcgtcacctcatatcagaacaccaggctttggagagcattcccaactcactcaaaacgagttattaagcagtgcttgtcagatttcagtacgataacgcgccggttatccagcttaaataccatacgaatgttcgagagactttacaatcatgacggcctcactggtctgtctccgtcgtgcccaaaatcgtcgtcgatctgaaaacccctgctcctccctccacgagtcgaatcacaatcacattggaaagtcctatcctcccggggcctgcggggcccatatcaagcgagaatatgatgatatggatcgagatgcaacattgggggctgtcgagctcttcgtccgacacggcttagaagtccaaattcctaggctcgcaggactctactgtgaaatttgcagctcatcatatcaaaacgacgacacgtgcaggcagcacacgaaaccgatatctaccatctcgaccgagacgacaccttcctacacattttcggagaaggtaggcaagactgaagcctccacacaccatcatcgagctaagcaaaagccccaaccgtctaaagaaccggctactgccacctacaggtcaaatgcttccgatctacgattacaaaccgagtataagtcgcaaatatgtttgccgaaacagcacaaccacagctaccccttatctgctcgggcaagcaagcatacgttccgcgaagactgagcggcgataggaaatggtttagaaaacgatgactatatttggatttgatacggtctgtggattgtcataatgattttgtatactgccgaccaacctccacatacagatgggagatcaccgtaaacttttatatatctgagtttgccaaggctttgtatgagcgttttcccttggaaagcctaaagtatgttattttactaccaccatccctaacaaatcccgggaggggcttgaatttccgtctaagtagtctcctttgccatttttgcggtgttcttggtactccagttggtaagttgtcgccgcctttgttttgtgacatctcataccggcgaagactggagtcaatataaccttcggttcgatattgaggatgtctgaaacctccagggctaccttgattcgcttgattaactctcaaatctatctagatgacagataacacctttcttttttgttggagtatttcctcctggtgctctagttgtgaggttttcaagtcggttcgaaacttgtttcgtttaaacaacgtagatcttattttatatgagaccctaggccaataagagaacggcattctctgatttcttaaatatgtgggaactgttaatttcggactctaaatcaacatctaaccctggtctggatcagatagacagtttgatatagccgatagaggaaataaagagcgatagtcaagttgctgacaagtattatgtctcttggcgatctatactcgaagaatataagttgacttaaggaacatccaagtagacaccgatgactaggatcacaacagtatcattggaatgtacgtacgcgttagtagcggattatcgtgctaataaatgttttaatgcaaacctttggtctttcattttttgtttcctctgatgttgggccttttttttttttctttattccctcggactttgtataccgaacttcaaatgtttttccaaattgccatgtacacttgaagcgaccaataaaaggcatgaatatatagtctcgctgacaagcttcaaactcaatccatggacccgataccgaagccacgtaagtgctatttttgggcgttttcaatcaaatgcgacacaactatgtaatgattggtggatagtgttccaagagtccaagagttgaacattgggaatgtgtcgaaaacatggccaataggatgatcatgtatagagaaaacacatcagattccaaatccgaggtatcgaggacttgtaatcttcagaagtctatttgttttttcttctttatatttttttctttcttgttctttctttcatctcccctctcttcatctgtctcgtttcatccgtgtgctagtctgtctagcatcgcaaggcatctacggttcccagctcgcggaggcttcctcctccaccatgcactgacccgctacttacgatccaaactgccttcgcacactacaattccccaatcttcctcaagctttcttctgcatttctattcacaatggggctctccaacgcagccatcattgtcatcgtcctcgtcgcctgtctcggagcaaccgcactgggagcatcgctcttcaagcactacaaacccgccgatggagagaccccgtggagtccaggctacgagcagaaggtctacatggccgaggtacgggctcgaggattcgaaaatctgaggcagatatactggggtggacgagatcttgagtcgcgttgtatgttctaatgatttctcgatctgctcatgtcgctgactttcattgttgattagatctcccagcggggccgagctactatcgtccccacaccacttacactgaagacaccaacacaaaatatacagcgagctcgtaacctctcctctctccttttctcgtcgcttttctcgaactttttacgaattacatggatatttgacggaacgaacacgggtgttacacgggggagaactggcgttacacggggttacatcgagtcacaacaatgatgggttcttctcaggaaacaaacactgagatgcgaatgagtttgcctggtttcacgggactaggcatatgctttgggggagtattctgattcggtcggccatggtggcttggacaattttttgtctcgaaattatggtttttttatggtatgggatggcccttggatctgcccgcgactcatctcgaaattattgccttgcagccgatttgcttgcatttgtatctgatattcacagtattgctctgatcgaatcaaagaaagtctatctttacaagacgaatccattgtgtgatctgaaaatcgctccgagctttggcttggaatatcgcgactaatcggagctttccaaagctatatatcctctcgaatccatggagacatggccagatcagtctcccgctccaatacggggtgaatcgcacagagccacacagtcagatcaaggaggccccattcaccagcgggcccgctgtctcgcgccctatgggattcaccatcgttgtggttcatcgtcccccgggaacgttccagatagcagatatggtggacaggatatgattatgtgcggcccttgcggacaggcttcggtcgcgtttcaagcgtttggccaggctgttcaggccggtggttttcggcgtgtggtctttttttccgggggtatcgggcctttagatggttctttgccatcctgaccatctgttatactctccacacacaaccagggagccggaaggagtcacttttcatcatgtctgtgtggtctgtggtctctggtctttccgtacgtacgtaggatgttttgtctcgttctccatagtattttcaccaattccgccttggatttgggaggttaatggattctcttgcctgggatgtgttttccactgccctttcgctgctgctcgtattcgtatgatcatgcagatcctgacattggcgagtcttgggcctagctcacgaatggggaaaacggcaaatcaaaagagcgcgaaacttcccaactcctcggcttgagttcgcgaatctcgccataccatacaatattgggtaggaggggattggggtcaactccacacaacttatggtctgcattataaattatgctgcgcataactcggcttccgaacttccgtaagaagtcggaggaactcttgaccgtttttcggggatccaggtgcattttgtgattgttctatgaagtcatttacatttgagccgacatcagggggtggctatgggtgtccggagaagttgaggctgtgaattgccctgtcgggcgcacggatagaaaaaacgccgagaccgaacatcagaacggctttcggtgcacaaatcctatcgagatgcgtactccgtactccgtattctgtatagggtatggagtagcgaataattggaatgccttcaaaatatcactcgagcttggaacgatctcgcaaagggaattgtagatgcctagcctgtagagtttacggccagatttacactccgtctgtgtctcaaatgtcccaggcagccaagatattcgtctctccagatataaaccagccgtattcgcgctggtttcctgtttcgacggtcccaccctattgcccaggctcgtgcacattgacatggacagcggggaaggccaaggctggctagctacatgtatttatactagaggtttcctttgagtctttgtagctctcaactctcagctctttgcctttttatcatttttcttgcctgtgtttttctggacgttcaatctaaaaacgcaaatatggaatctcccgatactattccaaactatgatagcgatacaacaagcgaagaacggtacgtaagaatgcttcggagaagaaaaaagcatatattctttcgttacactggcaattatgtctaattcaaccccagaccatcgactcaacccgtcaacaccaaaatccaggccaagttccaaatagcccggccgccctcaaaatcaagccaacgacttcgacttagccccaaactactccttcaaattcaacaactacctccaaaccaccgaccagtgcctgtactggagatatggcagccaccattccgcaagtcaaaattgaccaaaggtctccctcaacgcccaaagctcggcacgagagatatctacgcaaccctcaatgagccatatatcaccaataaacagtcaatgggacaaaaacatcccaaagaagaagatacaaaatcaaataatgtccaagaagaggatatcgtcgctgctatgtgccaaccgtcaagcagcatcagttctacatcctcaattcacttccgcgacacaaaatgcatctggaaatccagtaccaactcgacaggaactgagaaagggactttttacagattcatcattaaagaagaaagcacagccggctctgagcagccccggatgattatgcagtgggagaaacgggcactccctgcaaatggaaatggaaatgcggctccagataatgaacagttcattcttatggcgattgaccgcaagacacgccgaaagagtcgcattgctacgatgaatcggggcgggtttgatattttcataaggaagagttcgatcctggaccatcttcggacttgtatgacgttgacggtgcctgtttctgagagctctacggatttggagacttggttgtacactcttgtgttaactttgggtgtctcggtggcttctcaagaaggatggttgggttgattgttcttcatcgccggtggaaaacatgcatgtaccttagatattatggttacttgcgatacctttatgaaaagcactggggctactgatatttatactggattactgtcataaattgtgttgtagccataaatatacacccatttataggctaagtattgtcgaggccatcgccgaggtcatcgcaagcgcaagtccccatttatcagtaactaccaagtagtcaatccctcttccagcgctttgatctgcaatgccagtagacgcgagtagtatctgctaagagcgagattcccacccataaaccagaatccagggtgaccactccgccgccagatagtccgcatttcaccctctttatcaagtccccagatatcaccaaccctgtcagcaaccttgtcgccaaatatcacgcgagtctcggttctcatattctggtacccagtagcgaacacgatttcatcggcttcgagctctgagccatcctcaaaccggagtccatggggaagcacttggctaatttcctggccatgcttcacctttaccttcccatcgataatgagctggcttccaccgacatcaatatagtaaccgcctccgcgctggaagtacttcattaggagaccgctgtccgagggtccgctgtcaaccttgaagcctgccttttccaatccttgaatggtctttgcatcgttctggtttatgagcttggtgactttgacttgttgcgctttgaacagacgcgatggcatgctccacatatgaagatcggcgtcctcggttggtgggccgcttgcgtcatagagccctttgaaggcaatttccaaagtagattcagacgatatcacacaggtagagcttcgctgcaccatggtcacatcgtaccctttctcgacaaagtcctgggcgatatcgtttgccgagttacaagatccaatgacaatggcctttttcccctttgagtcggcattggcgccaggatgctccgagctgtgacacaaacgatctcccttgaaatcatccattcctttgaaaacaggcatgtttttcttgccagagtggccagtagcttggatgacgtgccgcgggtgcaaagtgcgcgtctcagttccgttttctgtcttgcgctcgagaacaaccgtccatctcttctcgttctcgtcccatgatgaagatttgatctcggtttgggtccaaacattaagctctctgaacttaacgtaggtttcgaagaaatccgctagcttatcctttggtgtatagacgggccagtcggccgggaaaggtaagtagggcatgtggtcgtaccacactggatcgtggagaacgagttggtggtatcgccgacgccagttgtctccaattctttcttctcggtcgacgacgagggtgtcgatctcgagcatcttgagacgcgccgcagcagtcaagccaccctggccagcaccttccctcctcaagtcagatcttatacttctagggaaaagcttcatcgacacataccaatgatcaataccacagggtcctttccttcaaagttaatctcatcaatacgtcgatctctccagttctttcgaccttgctgctcgccgtgtcggacaccaaatggtctctccttgttctccttgtagccctttgattcaatcagggaagtgaagacggtgaaaatgtaccagttgccctcatgttccgccaatcttataataccatttccctgtccattctcggtagtgactttgatgtaaaattcgattccgaaaacatcaccaaagaaatcaataggagccttatgtggggatttcaagtcagacgatcggtcgatttcgattttgctgggcggtgcctcggtgacaaaggcagcgatagcttgactgccctcgagggtgtggaagtcccatgaatagcacaagtggtcacgccagtagcaattctcgagaaacagtgatgcaacggcggccttgtctctggctgagaggctcgagttcagctggttgatgattctatctgcaacagtattcgggtctaggggaacatctgactcagactccgacatagtcttagggaattcgccaggttcgatgttgcatgaacctggcacaactcgctcacgcgatggcggtaggtcattggattttgtcatgttgaatttggtgattgttgatttggtttgattcgatttagggtctgacaggaagtacaaagaagaggaatagcccctcacttcttatttcgcctgttgataccccgcatattgattgacaacacatacctagtatgtacagatctgctgaatgcggggctatagcgttttaccccggctatgccattcccggggtccccatctacaaccatctacaacagtctatttacttacttttctagtggcgcagagatctgactaatgttccctggctactgagcccttggtgttaaacttgttattttctttcgatccttctgttgtcgatatataaattccagttgctttaacattggaccaaaaggcctattgtagtacgaaaacctcgacttacattttacggtgggttatcctgatgtgggtacctagataggataaatcaacccttgacgtagtattttttatggttgttggccgtttttgtctatgaggcatgtttgcttgttgtctacagctagtcatttgaaatatatacaacccgagctctttccctggtaggcaatgctatacatcaataaattttctgttcgccaaattgttatttaaagctaccgagtaagtttctatctccgttaagcattgattttccaaagttttcggttttttagctaagaaattagattattgctttggctaacagctacgaattgggaagctttttgataagtatatgatacacagtagtgcagcgtaatatatcaactagcatcattggtctagtggtagaattcgtcgttgccatcgacgaggcccgtgttcgattcacggatgatgcacaaagatttccttttttttttctctttcaattattctgctcttgatcctgattgattgatttttattttgtaaacggcggacctgcgaatctctggtttatcgtatatgctccggggctgcctggcaacatagcaaacagtcaataccaaccagcgcacactacttctcaaccgagaacccccgagagaccgtcgtgagaaaattaccatcatcaagcagggaattggtatcctctacgagaagaaattcattttaattggttctcagtcatgaaagtaatgggctccatctctctggaccccaatgacagatgtctgcggccgcaattacagtcctgtatacaaccgaagcgagcatagacgataacaactagaactcgcattgcaccctacgaactggtgcagcgcccattgtgagcctcccatacagatccgacttccccggcattgactaggccggatggattggctttgatgggacctgatctatcgctgacaaccagtacaactttgcgccagtgccaagctcagcaatgctcgcgattatcgggtcgtctggatggacagattacgagcaagtcgggtgtggttggccgggcgtcttgcttccaataccttgactaggtatacagccgcgattgacagcaacagcggaaaggccacggctttgaagtcagaggcgcattatggtggtataaaagtaaaaaagtcttatcacctgtcactttttgtgaggtcgctacacggtagagactactgttatcgcttctgatgatgactgaagagtggattggccggtttgtatggaggctatggtggtggtttcaagaacgtccagatgagcagtctggcttgagcgaactgtggtcttaattgatctatgcgacaatcggaacggggccctgtttaaatactatctcaggtccatacaggcccagaactcgacgtgattcacattttggacaatctacccgaggcaatttcccgtttgtagcagagtggagcatgagaagtcttacattcttcaactatttgaacaaatccatatcagatagttcagctatatgaagtattccccttggaattggaatattcaggcttaacactagaaagacagataaatatagactggacagtgcaggaggacaaagcgtatacgactcggaactttgaaacgtctcggaatttcgaaacgtctcaaacggcacatcgcgaaatcctcaaattaaattccattcttcgtacgagacctgagttccttccagccccctccagtgttcggaatgcggggaacctttcgtcactcccttgacaccttcctcccttgatgattttgtcggtcacccacgttgaccatatctttcctgtaccgtttatgtcgatgtgattacaacgtggaatcatcatgagtcgggcccggcgtcatgttctaggcgcttgcctcggggctttcctattgctcctgctctatcgttatcaccgcaacaacgatgcacccaaagtcaccctgaatgttgaaatcaacccgaactatctatggagaaaactaccagtgcgatacccggttgctgaattgcatccactacctgttacactgccccagacgctccccaaggttcaaccggcagactccgaagtctctcgtctcaaaatcgaccgccaaacaactagacagtcggtcgtgaaagaagcctttgaacgatgttggaagtcatatcagtcacttgcttggggcgcagatgagcttgcgcctctcagcggtggccctaaaaataaattggggggttggagtgctacgataattgacaaccttgacacactgtggattatggggatgcacgatgagttcaaaaaggccgtggctgtggtcacggatatcaagtttgaaaatacacagtcgcctgaaattaatacccatcaagtcaacatccatttactcggaggcctgctagcggcatttgatctcagcgctgatcggaaattgctgaaaaagtctatcgagctgggcgatatgctttacgctgcctttgataccccgaacagaatgcccatcatccattggaatgtgcaaaaagctgctcgccgagaggagcagcttgcagagggaagtgcactcggtccagaaataggctccttcacattggaattcacaaggctgtctcagatcaccggtgacccgaaatactacgacgcggcccaacgcgtcatggaattatttgacaagcaacaagacgccaccaagctcgcaggtatgtggcctgtcagtgtgaatgccagtgaagaacttcttgacgacgatttcttcacattgggcgccgaagcaagctctctgtacatgtcgctacctcgggcatacgctttgctaggaggccaagtgcccatgtatcgtaagatgtacgagaatgctacgcgcacggtcgcaggctatactttatttcgaccgatgaaccccgagggcaaggacgtgctcatttctggcactgtccaagtagccatgacagagaatgggaatgaacaaacacacctagagccgcgaatgcagtaccaatcttgttttgcagggggtatgtttgcactaggaggcgctttactcaacatccctacgcaccaagaaaccgcccataggctggtcgatggatgcatctgggctcaccgggtcataccgctggggataatgcctgaagccttcgatgtggttccatgtgcgtcgcaaaagaactgcccatggaacgagtggcactggaagcaggaggtctggaaaaaggcgaacagcctcgaagccgaaccaaatccaaatctcaacgtcgatactttcattaaagaccaccatctacccaagggattcgttgggatcccggatactgcttataacttgcgctcagaagcgatcgagagcatgtttactctctaccgcatcagtggtcgcgaggatctactcgatgcagcttgggatatgttccaggcaatgcaaagtgcgacgcagacgaagaatgggaatgcagcgatcgttgctgtcacggatgagggtagtgaactgaccctcaaagactcaatggacagcatttggatgtcgcagacactcaaatatttctatctcatgttcagctctccagacctgattagtttggatgagtttgttttcaatgctggagggcacccactgaaacgtcccgaggcatcatgacaagaagtgcatttgttttctaccaccatccctctttttatttttaattatatggttggaagaactgatgactagaatatctataattgtaccatagtgtttattgtatataaagcaagggttatggttcattaagcccggattctctgttctctttaccaatgaaattgaccgagggaactcagtcagataggcaaattttctatatcgaatatatcaaccatttgtaacttcttacaacgaatatacaggtcgtgagtgtaaatcccatggttcgtcgccctctgcagcccactcctcctgggtcttcattcccttcaaagggatccccgtccgttcggcatactctcggagaacatacaagacgctctcgtctccggaatgtagtgcccaagagtatggcgagtgcccatatttatcgtgggggtttggatcgactcctttaacagtaagcaacagcgcaaccttgtattcatccctgcgaattgccgctaatgccaatggagtaatccctttatcatctctggcattgacatcaacaccggcagcaagaagaatctttatcgatgccatacttccatgtctgacggcaaataacaaagccgtctggtggttattgccgaggatcggccgatctagctcggatttgttcaggacaaccattagcatgatgacgcgcggacctgcagtttggattgcgtgcatgaggggcgtaaggccgcggtgatccgggctgtttgcattgaaacccggtatggagagcagtagcctgaccgcttcttcatcgtttctgattaccgcctatattagtggcgacatgccctcatgatcgggaatttctggatcaatccctttggcggcgagcagtatcctcattatatcgactcgtttggacatcaccgcctgaatgagtggagtcctgccttggtagatgggctgcggatcgacaccgtcgtgagcgacaagcagccggagagttctcaaactccccgctgtaaccgccagccccaacggtgtgaggccgtagtagcccttgcagttcgggttgacactaggcatagcaagaaggagtctagctatccggtcatgatcgaactcggctgccacatgcagtacggtgtcaccgttgtactttgccatgggattggcacctgcttgcagtgcatttcgacaaacactttctcggttgagtcttgcagcgaagtataaggcatcgctctggggtcgtgccgcatcgaatcgaaaaaggtagggtggtccttgttcgagcaagtgcaaatatatcccccgatgatttgagcttatctgctactgctagtagcagttcgttgggtagttcggacagaatcatttcaatttgggtgacgacgaatcgtgccactacgaaaatgggtctttccggatcaccactagttaactgactatgatcaccgccttagtttgggtttaggaggcttggcatacgtctctatccgcagaacacgcgcttctcattggctgtgcacttgctatttgcttttctctcttgctttctgttggaagtcctcgttatcatctataaacaggcatttcaatttgacgaaattcgtgcagcgtaatttaccactagaccataacaaaaatcaaggttcttgtttagggcctagaggggccatatcccattcttgatacaattctatacctgcatggtgtattttgactttttactatgcgaccgcgtctttttgttcgcgtctactccgtacttcgcttttccttcgcgcttacttcgctctcgtacttctatgttttcttttacttcttttatttcatgactcttattgctatcactttataactcttttgcttcatgtcgcctgtggcctatgtaatccttctaattcgcgctgccgccgacggaccgctgcagcattctggctcatcttccacaacagttccttttttatctcctcccggtgtttcccaatttcttcctcggtttctactttcatctgtcaagtatcagtctctatcctcatatggtctgactatatacgtacgaggtatccatcttcagtactaaactcgcaaccaatacagcgtcctggcccgatatattccactttattgaagaggcgtgtgacgtgttttaggatagttttacacccatgacatagaaaggtataatcttggcggcgtggtggtcttggagattcagacgccatgttgtagtattcgataatagagatggggttgaagtgagggtttagacgtgagtatctgcgtgatcatataccgtgtgcatatatatctaccccagggattagagttactccgttccgtgcattgacatgtcatatttcacaacgccgtgccgacccatgttgttgtacgaagtacttatttctcccctgactttccctgccttgctatctatagcagaatatggcagaattctatattgcacccgattggaaggcggtacaggatattcaggcagccgtgaactctgggcgggaagcctcaggtgtctaaacctactgagcccctgattgtaatcacatgccctaaaatatatacaatatgttcgaaagtggtgatatatactatttgatgggcgctgtccacagtaggacttcggcttattagtttaaataggagcttggcatggggtcgatgcattgtggggcagtgacacacagtgacacacagtgacggatattgactcgtgaattcagaaagataaaatgaatgagattggtctgaaatatcagacaccaaacagatattccatgcacatacaacatgaccaccatcgagtccacaaggttgcgaccagccagccagctaacaccgacatcaacacccttgtccatccttgacgcaacagtcgtgcgctttgctccaacaggagcaatctggatttttaaccaatctgcagacctagatcagaagaccctggttgaccgcttgcgaacttccttcattgaaaccctttcaaaattccctcaatgggcaggccaactccaatgggcacccgtcaaccccaaaggagaccacacagaacgtttcaatcgtccattgattgtatacgggactgataccgacccaggtgtcgaatggacagtaattgagcgccccttccgagcagacgaaatcgtccccacagcgggggaacgggcttcatcgaccaccggctctcaacccggagtatgggtaggcgatgacttcgacgaaagacttttcatatcatccaacccactggcattggccaacctgcgcgactatgccggtctgccagggatgcaagtccaaatcactctcctccaggaaggaggctacgtgatcggaatcaaaatggcgcactgtctagcggacgcacagactttaatggtattcgtgcatctatgggcgcataacagcaaaaagcaatttggaaatcagcccgaatctccgctaatgggcgagcccgtattcgatccgacgttgctagacaactgcgccgcgggcgatattgatagccccgagccagatcgaaccctcgtacacaccgcgcgcaaattgcccttgcatcggtatagctggtgggataccagcgacgagggctacccggcatttttgataccaacgacagagaactccaaacccgcagaaatcgactacaaacaagtctcgccctccgagccagcaccctggggctcgtgggatttctccaaagaagtcaggtacacacagttgcactttacaggtgcggagctaagcaaattccaagccgcagccctcgacacaggcagtcgaggtgacatctctcgactggacgctctactcgcgcacctgtggatagccattacacgagcacgcggacaagccaactcgtcaagacccatatacatggatttgagcctcggcacacggccgcgtgtttcccccgctcttcctgatacgttcatcggatcgccgttgttcctgacccatgttggtggaaccgcttcctcgatatgtcaggaaatattaggcgagacggctagtcggatccgagagaccatgaagcggtttacggctgatgctgtgggtgcgatgttgcatgatgctgcgcacgaggtgtcgccccagcggctgtggcaggggtttttggggcctgagcatacgcttgttacgtcgtggttgcggctgcaggtgtatgaggttgactttgtgggtggggataagccacgttatgtgcacgctgttatgcctaagatggacgggtgtcttcaggtgatggatagtggggttcatgatggcggggtggatgttgcgctctatcttgacgcggtggctacggggcggttgcttgatggtgactgctttcgagtatgaatttcgatgcttttataagtccattctagtggacgaacagcaactattggtttatatccacgtaaccgcgtaaccgggactaccaaaaaaaaaaataaaaggaatcaaaatttatacagaagaattaattataaatgaaaagcaatacctaagcactcattgaaagcgcccgatgccgtgatgtccgtttccgacaatcagcatctcgactcttgcgccccattcggccaagagacatgctctcaagagtctcgggcttaccaccccaaagcttagttctgccattccgtttttgttgtataggtggaatccagaagtgcgtgactgctgcgccgatgatcatgcaggcgctgaaaacaaggagaacaatgccgtgcttgcgggtcgatgcgttacccggccctgcgccgaagtgataatatgctgagaagatttgtacgagaatagaacccagctttccagccccagcgctgataccgtgacaggttgcgcggtatcgggttgggaagatctcggcggggatcatataggttgttgcattggggcctgtgggtagttggttagaatgatttagtgcatcgtaacccaggtttgacttaccaaagttgaacatgatttggccaacgatgtacaatgccaccacagcaggagggtgggagtaaagacagacgaacatggttcccagggcgataaacagagccgctagtgcgaggaacatgtacttttgcagtgccacgcgatccagtttatgggcaaagacaatgagcagtaggccaccgacaaaacttccgatgttgagcacaatcagcccgcgcacagaggtttccatgaacatcgtgtagatatcggcgtctggtgaatcgtctgtcatccagctcggtgccgccgcggagatatgaagctggccccacgtctttgctaagaattgagggctcgacaatccgataccgtagaagccgaaatcaaggaggagccacgcgagagagcaaccagccaagctgcgccagttcccttctgtccagaagtaccgcatgatgtcgctccgtgccaaccgccagtgagagttgagggtagcggggggtaagcgggtgaactcgtcatcatcttcatcgttatcgaaagtcgaacggctagcaatggacgaaatcggaggtagttgaattgcgctaccggcactgcatgtcgcagtgtttccccagcccacagaatcaatcataccgggcgtgtcactgaaaagggtggttgcatcaaactccgccgtgacgggatcgtccacgatatcgactaggtagcgagggctctctgggatggcgaaccggaaaagagtagcgactgcgccgggcacgactccgatggcgataacccagcgccacattatatcgacagtgcgggtgatgtcttcacccggagtgctattagcacgagccactgcgataacaaccagtgagacgatgttgcctgcaatctgaccgagtggctgcatgaagaagacggtagccatcatgcgggcgcgatgcttggtgggggcaaatctgatatttcaagggtcagtttttccacgattaaagatttcgagatcgatcgacatactcagacgtaatcactgcactgagtggataatccgcgcctactccaataccgacacagattctccaccaaataagccatgcaaagacgttcatgcttccgtccacgcctgtcgaagacatgaccacacctagggtggctgtaatgaggagtaccaattcaacaccgtacatcttcttgcgcccgttcttgtcggcaagaaatccaaatgccacttgccctagcagggttcccccaagtgttgcgatattgatgcatgtgagtcgtaacgaggaagtgttgtctctccagtatacgtaggatatcatcggtaaagccatgttactggcaaatagctgtatcgagtattagcggttgccgtttatgcgttgcgacaacatttcaatctgctctgaaacagggggctcacgcactgtgtaaccatcgaggaagaacccaagaccggcgaccagcacgacaatccattgaaagccttgcctgtcgatagtctcgtagatctgtcgcatgcggacatatcgatcctaaaaccgaactattaggaacctgcatcatgcatgtcatgctgttcggacattccatacctgctcatggtcgaagtccctggcacggtcggttttatacaaccgggcgtggaacttgcccattgtgaatattagaaggttgaaagatggttaaagacttaaagtcctacattttcgcagaagatcagaagatgcttagattatacccggggcttccaaggtttacaaacgaaatacagacggaggcccgtgatccctgcaggcgctaatgcggggctaagctgcgagcaagacaaagctttagggttgttccccccacgtgcggcgtctcttgagcttgacttgtccgtggccaccacgacggatccacatgcaacggccagcccacgaggactcccttgagacatggcgaatttagattagatggttcttgtattattaccaattgagccatttattctaattaatcacttattgttgcattcgattattcatttctttcattatatttcattatattccagacgcaattctagtctcaaaaggtatatgcaacgcccaggggtatcttggtattatgtgatacatatcggcccctctgcccaggaactccaactccatgtaaaatccatagcaattgagggatttatatccgtcctcgtgaacgcttcatccaatcgtcaggtcgtatgacaacatctgacaaaatgctgcgcagtctgggaaagagagaggaataagcgaatagtccgaaatgaaagaaactcaaatgtgcactgaccatcatcgtcaagaaactgaatcgtaagattccgcatttgacacagaatctcgaagttcggattcagatccagtagggctggccgcccggcctttttcgggggtttaattgagccgatacagttcactagtcgggctgttagcaaggtcgctgtggccggatcgaaccgaaactcacggggtatggaaacgtatcgtttgagctccctccgctgcgagttagcgaagaatagcattacacgcttcccattgtgcccgcggaggatgcgaagattttggctgatgcactcttcgccccggcctttagacttggcctcggccatccccccgataaagatcaacttggagcagagcagcagttcttgaaaccgtacgcaatctgcgaatgtaagcggatgttcatcctccaaggtttctcggtcgcgtaccatcccaatgatcgaatttatatgatagctgcgtcatgaataccgtgcttcccgtttggaccgtttgctggtccataaaggacacgcgaagagggtaatcgtcgcctgattttggatgctctaggtgggggaccggcagttttgtattggagactatgatttgaatgatcagcatgtttatctttcggagacatgcgacacaactcacagccatggataaaaggtgtttgctggcctaatcctcctccgagttcaagacatctcaatgcgcccgttgagtccttgcaaatatcaatgaatttgtatttcagcttgaatagttggccgtttttgacaaatgaactgcgaacaagtcagcgcattcccaccggagggagccatgttctcgacacaaacatttgcacagaaggagtcagctcgagccgcacgacttcatcgtagaactgccaggattgcttcctcgagctggaccctggggatgtcgcaggactcggaaagaggatactcgttgacgcggacgacacggtggaggcggaatgggagctttggcgtcgatctacccactcctggcaatctcgaggagcaaaagggttcattctctcgttctatacaagggataggtaatgttgaagatacgatcgggcggatcccgtctgaaaaagatcggccaggaacacaagtggcataattgacgatagaattatatgtagaaaaagtaaatatacactcgaacctatgatatccagaaaccgaaaatacgtcggggatgagcgtaacataatgtggagaggggatgtggaacgtgctaaaatggctggctatcagatcacgacgggtcccacttgcatcgtgctttcccatgtggctttgttaaatttcattgggacgttcagctgtttgagcttgaatgatatcagtattacggaggacattatccgagctaccgttggtataattgcatttttacctctattagccaggaccgatgcgcttaaatattcccgaggttactccgtctatatctacaccttggaagctaggctaaatgatccacaaacacccagaatacttctggaactggtctggaaattcttaccgatcagcatcccatggttatagttccgatgcctgcagcttcccgatgcgggtcgcataaactcggctttatagtagagccaaggtgccaatcaatgccgaggctcatgaagtataattgatcttgggcatccagtcacactcttcagaccctgcacaaatcggtactaaaacacgtaatagctctttccgccggagttatagctcgaaactaggctttcaatttccctttttagctctcggacccagtgccatatcgacatgcctcgatcaactatcgttttttagcccaatcagcgggcctagtgtgaagtatgttcgggactcgttagccgcatttgcagacataaatagtcttcagattagtagagctatatttgttattttatactaatatgctcccgcaattagtacacgtcacagagggtatgattgagtaaacctccaatgatagaggcgatttgatacagcatagaaagccacataactaccttggccactaccacgagtgatatttgtaagatactcgtccaatacacactgttagttagagatctgtttgcattgcctaaacagtgatcttcccagggataattgccgacctgactgccattgacaagttacataggaaaagccgcgacctgcagattcgttgttcgaactcgataaccagagaatccgacacgcagtcgtgctaggaccctcgctcagcatcggcccattgttaaatgagctggagcataagatatattagaattggcccatacgaaaatgaactagataaattgaacggaagatggctctgtttgtcagtggagattaatagtcccgcatttttgatttcaggatcgaatctgtccagattggaggtggcatgggaagacgtcacattcctctctacagcgcggagaagagttttgcctaccacttagggttatattgttcgcaactatagtcagactatgttagaaatgaatgttaactactaacgacttatctaagattcatcttacttctctctaaattgtacccgaattgtaaatttggctgtcattatcttgtcttagaagggtcagcttttgtccttcggagctcttagagtcgtctatcagggctgaatgtaacttcactgacttaataatcatagacctctaacttgaatcaattacactagcctgtgatgtaggtgggctacatataaaagcgaacttgacagcaggcatcaacctttccttgtcatcatccatcaagcttctgatccaacacagcatgtatctcaatcgtccaacctatctttggcaacttatttacatctactcgtacagctaacaattttctaacaccccagacatatccttttgacattcaatctacgtcttatctttactccgtcatacacaagacgaaatcccctgaactgatgacaaaatcaagaccaattcacgcaaaaatacacttagcgaagtcaaaatgttcgtccccgacgcagaagatccaggatctagatttcagggcgagcctcacttcaacatggctccagtcgctccagctccagctcagttcggtcttgggtacttcggtcctccgtccgttgaccctagtcctgttgcttacggtccttgcaaaccgccgccaatttaccctgttttacttgggcccgctcttctatcccaaataatcgagccctcttctgaatcagcctcccgaatggtggatggcaagccggtgtttcatccgcagtttggatattacctcggtcttcgaccaattgacttacagtcatttgtccctgcttcatttccctatctcccttctccctcctatggtgagtgcctttttctctcgctctcaatgccttgccttcctttgaacattacttatactaacctgaactcagcttccttccctggcgaacctgttgagatcccggggaacaaatccggcgagtgccttgctgctcatcgcaaattcatgaactggatccatacggtgtactattcatcaaagtcgcccgaatcatttgtgcaagcatggcaacgagccctcaaagagatgaagcaggcctttggatccccatatcttcccacgatcttcatcctcaaccaattccttgctgcggtcagtgtaaatcctgacaccattccatgggttgagtcgctccactttgagaaaggttctctgccagcatccatactagatgaagccttcgccgatttcctggagtttgaggcataccgactaggaaaccaacagtcgcccttaggtaacctaggtgctgacgtcgctaacgtgtatcaaattgaaaatttcgccaagcattactgtccctttcacctgcgtctcacaatgcatcccattgaggaatgttttcgaaacccacagaacacgaagcgtaggagaaagtggaggcggaagcaggcacggatggcagcagctcttgaggccgaaaatggaggcggctatgattgacatgttctgttggagaggttaccggccatcaggtgagatttaatttctagtgtccttgtcgtgaagaggctacggctctttgttttaatgagtgggatctgtgttcagtcttttattctttcatttctcatgtccactgttgacattttcctaccaagatgccctctccttccgttgcagatgttttgaacatcaccaactttcacacccatgaatgcctgaaggatcggctacagcagccagattaattacttcttgcacctttccctttttcttttctgtcatttactttgcaattgatttatgaaaattttctccattccaaaattgctattttatctctggtgtagtttgcatcatcctatccaccatgcctgctataatatgtatgcgctgttctatatatcctactcttaacatagcttttaccatccatctcttcggttcactatattccttccgtgtatttcatcattgtctgtctaccatctattcctcacgttatcatatttcttctatcatctctccctgtcctattcttctaagatttctcctcccttcaccatttatacatatctgttcacgtcttatccccctttgttgatagagctatagaacgagaatgcttccatcaattggtaagatggccgagttggtctaaggcgccaggttaaggtttaccttgactccacaactagtaatagtttcctggtctcgcaagaggcgtgggttcaaatcccactcttatcataactttttgctttttgttcatatcgattgctttttgatctagttggtgaagttttatagtcaaaatttgtgtggtttggtcggttagttcggttaagaaattttctttattgtgcgtctagtatgatacgtcggcaatataaaaccaaacttacttattaagatggcatattaattcagctataggaaagctaactgcatcttatatgttagatctagaagaaaaatctctagaacaacaactgtatactatctcgggtatgacacttgcatggcatattgtgaaagactaagtcaatataaatcgttcaatcttaattgcttagggtagtcctttccatacatttttgcttcttagatacataaggtgtaataaggtcaggtgaacactttcagaaatgacagggatttccgtcaatacaagtcccttaagctggaccagatactagcttacctgatccagtaggtttggataagtccttagcgacacctcgaaaatgtggagctagatttttgggcattaagaaggtagatagaactagcctgcatgttgatctaggttataaatgagggatacatcgatgaaaacgtgtcttgtttcgttaaaccttcgagcacctagaacatagaccgtattcgataacgaagaaatccagaaagctgagagaaaatgtattcctaggcgtagaaagaagaacatgtcccatcatcccgcaatcaagttgcagcgaccgtagattatgggattgagaaagaagaacagtcacaaatgcatatatgtcacctgttccgacatagatccacttctctgacagggaaactgtctctgtgatatctttcacagcggttacctaatccggtaatacaactgactgtcactagaaatgagagctaatcgagtctccatctatttgacatctactcgtcttcctgatccgctgctggatacagtaatttcgaggagatcatgctcacgtggtggacgttcgtgaatgacacgccatggcccgcttgaggggagcgggtctgtcaatatcgacttggcaatataatgagctctccggggagtgaatttcctcattttgatctggtgaaagtgtgtaagaagatgttccaggaatggcgaatagttgacagaatcatattcatgcaaatcaaacaataggatcattagaaagtacagatatattctggttttttctgcagagttggggacccggggcgaagacgtcacttggcccctgcagatctgaggatattgtgggcgaaataccgctatccatggattttaccactttatgccacgatttgatgaattaaaagagggataatcaataatgggagacttaaatcgtactttacataacaataaccaatgtgattgtgttcaaaggccctctaggaaggcttatatgcatctcaacccaaccacccggatgtcggatacgaacttaacaccgcgatctaaatataggaagcagaaaaaactggggataattggaaagcacgacagtcaatcaattacaacagcccatcccatgtgtatgattcaacgatcgctaccaaatgtatcatcccaccttgaatatactaattttggcccgtttgtcctgtaagatttgctctactcagccttgggttgaggctgaacaaacagtctgacctcatctatctgcgttggagactagtctattcctggagtcgtatataaagaccagctaactaatgatttgatgcgctatgttttacgaagtagacgctgatctctcgtcaccactttggcttaagaaatatcatgggcccgtgtgagacagccagtacaccgcatgtcctcaacccttaaaacatcaccaataatatagaggactggtttgaaatcaagtctgaatgcgttgacatcaagtgagacccagtcaggttgcttatttcaatacctatgcaagggagatttccagtttagtttcccgattgaccttagcgtcaggctgtccgtggcttccgtgaactaactatgggatatatttgaaacttgcacagactcggccaatcaacgtctttgatacttttagaattccaggggtggctactcgggctggcccttcacccagattccgagcacataaataccccagaatcatcgcattttctacagtaactctccatacaatagaacatcttataccatctgatcatcttaccagcaaattctatatctccttcaaaatgaagtccttcttctccgttactctcttcatcgccgcggccattgctcagagtgccaccatcggactccccactgagaaccaggagatcaatcccggcacggaagtcgtcgtccaagtgcagcgtcctgtaagttccagagtgacctcatcacagaaatccgttttactaattgatcatccagaactctctaagtgggtccacggaggtgggcatagcgatcggcctctcctcgtgtgcatccgcaccttgcaggagcgcagaggatattcttggaacaattctatacaacgggcctttcagccctgtgtaccacgagaccaacctgcccccgtatgagaactttacgatcactgtgccggcttcggctaccgttggcaaaagccagattaatgtcgcccatgcggctctgattggtgtaagtagatctcctacattcaaaggaattcaagcatgctaattgaattgcaggccggtccttccgcgttcttggagtctttcaaccagactgtcttcgttgtctagattggtgccagcttcgtacatatgtcttttcattcttgttgtaaatcgcattttgttgtgaatatgccttgagtggatttgttgatatatttgaatacagttcagtttcgcaaataaatttggttatacatctatacctccaacaatacgctcgaatgaaagatatgaaccgttctttaatgtacaggagaatatgagcagcagacgcctttgaaagtggcgttgcccgggtctcgagggtttctttgtttaggaccaaccatttttcattagtctttcctattgaactcttcattcggacatagcctctattcaatactcaacctataactggtttgattcttctgagtcttattgatacctggaccgggccatctataaaatccgcctgttcatctactctttgtcccgattctgacatgaataagactacaacaagtctcaataaacatcatgtgcaccactgggattctccctcggaaatgagagctttctcttgtcttcgatcccacggaaaatccgcacatcgtcactcgttaattctgtcatgatggacaaggtcttctctcgcgactacaaccccatccccaaagcagatgccgatggggacagcgatgtcaccatcacgaacagaccgccccgccggggcctacaacaatttttgaaacgaaacctcgccgcaataaccataaccggcctgctgatggtcctgttactcctggtgatcgccgtaatcacagccatcgccgtggaacccttccgcaaggtcattgtcctaaaacggccaccctctgactcgctcgcataccccgaatcactcgaaggccagcgacagtgcctgccaccagctccacgagtacgatactcatgcggcaactcaaccaaggaggccgaagcgctcggctgtgcctacgaccctcttgctggctgctggctgcacaaagaatgtccgcatgacttcacgcacgagtttgcgcatttcaacaatggaaagccctttgtatatttctatgacgaggctgccacacagcaaatgaaggattacaccgaactcggcaataacccggacttctactggactgctgtccgtgagcatctggtccattgtctgtatctccttcgtcgaggccacgatgtccacatgcgtgggggtcgtctggacaatatgcttggggatctagagcatgtcgatcattgtaccaacatgttggctaattggctgcggagaccggatcccgctttggaggagataggcacgcagggccagactcattgcttcatgtcctgtgcttgattattgggtatatatatagtcatggatcatgggatcaaataagacggatataggcgccagtaatcccgtgtcttggacagatggtgttgaactttgtattgttttactaaaagtccagaatgacagtggctttccagtgtttcccactattatgttatatatcttgatccaaaaagaagaaacagacatagtctattctgatttattccaacaatacttgaaggtaaaaataaatataggaaattcaagctttccgggtatctaatctccgacttgacttccgttatgtccgcaaccgtgaaaataggcctccacgaaattataggctcctacgaaactataggctccaacttcttttataacaatcatccaactcgcacctatctcccagaagctcctattcacatactcaaaatgcctcccaaacgtgtcgcgataatcaccagcagcacccgcagcccccggctcaaccccacgataacgcagtacgtctatgacgtcctcatctccgacccgacaatcccaacaaaccacagcaaagcaaccgacacagacccgcgccacataaccttcgaaatcctcgacctggcaaagcagtcgctacccctctacgacgaatccgtcatccccgccggcctgcccgccgaagaccccaccccgcactacagcaaagcgcacacgcgggcgtggtccgcggtggtgcgccagtacgatgcttttatcttcgtcacgccgcagtataactggagtatccctgcgagtctgaagaacgcgctcgattatctctacttcgagtggaaggggaagccggcggggattgtttcgtatggagggcggggtggtgggaaggcggcggatcatctgcgtggtatcttgaccggcttgcacatgagggtggttggcacggcgcctgcattgccggtcaagtttactgggtttcctgttgggacgttgtcggaggaggaagagaaggtggagctagatgagagggatcttgttggatggagggaagctggggttgaggggatgatgcgaaacttgggaatggaattggtttgtgaattggataaggagtgatctagtcttcagcagatagcatggcaggttcttcctggtccgatgtgatggaacttatgatttagtgaaagaaatcgacctagtacgagtacgtatactccttaatagtagatttagcaatacactcggcgctccgcaagttattgagagactaaacggtagtatacggatttataaacctagaattccccttgaagttactattactaatagcgaacgcctcgatacagccggttacgcttccctccttattaagataggagactagaccggccggataaaggcgtagattcttaattcagagtacgacctcatcctcggccttgacttcgagatatcgaccttggagtctcgaccacgcatgaacctcgcagtgtagtcagataaatctcaaatataaatgcccatggggtctgcaccactggccagaagcatccgaacttttccggtgattaacgcgaatagcagccgtgagtggagattcgtaggtgcccatattgttcccactgacgttggcattaggagaacaccccgctagttcacgaagtgttctcttgtggtaatccaaaatagcatggaggacggctggattggagttaccagcagccctaatggccgcagactcctcaatgccccaggctacatcttctctggtgagtttatatggcatggtatggttgtgatccttaccttcttactactttggtccagtaggcaatgaaaccttctatgatcaattatgtgaggaaaaagtaagtcaacaagacaacacaaaacagtccaaaggcggtctgcacaccataatctttagcaaagtcctgcaaacgaatgcacccatgagtgagagaagatatagaactattcaccgcccacttttgcttcgggatatctatagtccgtgatcgtcaccaaccctttgattgctcttgccttgaagccactggggaaatataaatacctggtcctccccccagattggttctcttttttctttcttcttcatcctagtgcaagggctttacacgtatcagtgaggagacatccgagatcgtgtttttgctagttgaaaactaccaccttgactgcttcaagtgagcctcgcggcttgcttgggaatttttgaaacatacttactctacctcaactccttgactcttgagtcctcgagttgaattcctttgaatttgatgccatgatagatatttggactcagtcttgagttctgagtgtgcgatcacatgccatcacattaagatctttgttttgtttgctcgtttgcttgctcgcttcccgtttgcattgtttactagtttgctttcattgattgtttgtcaggtatctcagcgagaggtttggggtttgcaacgtttgtaaagtgagctgtatcaacaggctgcttcccactttgcacctgcttctttccctctccatcttagtttctgaattgattgcactctttcctacttgagaagacctagcatgtcacagtcttcacgtagagcttggtatttgcataggtagttgccataactaccggtttatttcacatgatccttccttccttctttccctatctatactccgtcccttccctcctcatctgataggtactgaattcgaaggatagtatgtattaaagtcacattagatgtgcctttgtaaggtatgtaactagaatgtatggagattatgtacttttggatcgtcaatcatctcagtcagtactgagaatgtcctcgcgcgtgataccactgcgttcacacatggcccggaagatgccatctgccttatcccacagcgcaactggtgcatccatctcagcgatccgacccttatccataacgcagatgcgatcgtagtggatgatcgtgcgcaagcgatgcgcaatacacagcaaagtcttcccctcgaagccctgagccatagtgtactggatcttctgatcggtctcgaagtccacggaagaggtcgcttcgtcgcagacgatgatacgtgcgtcgcggaccagtgcccgggccagcgccatcaattgccgctggcctagggaaaagttcagaccttcgtcgtcgacaggtgattcgagagtgagtttgtttgtcgggcgcgctttcacgtcactgtctgtgactggggttgtagttccgctggctagcccacttggcagtttctcgtcttcggattcttgctcttgttcaatgaggtacgccttgcgcagcgcggaccatagttcgaggtcatcgtgctcgttgaacggatcaaggttcgagcggatcgtgcccttgaatagggctgggtcttgggggatgatggcaaggcgggatcgaaggtcgtggaggccgacggtggaaatgtcgatgccgtcaattttgacgctacctcctgatagttcagttaaacggaatagtgcggacatgatactcgatttgccggcaccggtgcgaccgacaataccaatgcgctcgcctccccgcacatccatggtgaggccctgcaggacgagtggaagctcagcccggtagcgcatctccacgctgttgaactcgatgtggcccttgtcaggccagctggctggcacctcggcctgatgcaaaggcgcctcctcttccaattcagtaccgtagaagtgaacccgctctgtggcgttcatgttgttctcaacctcggccaactgacggactgtgaattgaagcatctgtgcgatagccaagatataagacagcaccaacccagaaatgctgggggacacgttgaaccgagaagtgacgaccagaacaccgaccacgaagaccaatacggtcgccacagcatcgagtcggacactaagccaacgttgattggagaaagtgaggaaataggccccgttcatcacatcgatcgagtctcggatggtgcggcggaattggttctctacgccatatgctcgaatgcacgcgattccggtgatggcttcgccgaacttggcatacaccattgagcgcaagacgctctcgtggcgcttcatctcgcgggcggatgctctgtaatagttcgaagctagaaggaacagtatgaatagcgggacaagtgcgatgacgaactaaaggagttagcaaagatcaaaataccaagaaaattccaagagagagggtactcacataatagaagaacactatgaccaagaccatcacggagataatcatagtcatggtcagggcatagatacgcatcgcatcggaaagttcattgtccatcacctgaatatccttcgagaagcggttggtgattcgtccaagtggtgtagtatcgaagaaagccataggcgcgcggagaacacgagacatcgcacgctgaagcatagtcttgctagcattagtaccgcatgtggtcatataagtcgagaaactgaacatcaagacgacaacactgccacccagtccagcgtagattccaatgtattggccggtcgagagccccgggtacttgtcggaagtccaataggacagccacaaactagtccagatgttggcgacattggtaaggccgagcaagatgaataccatgatagcattgaaataactaccggaggctcgaatatatgccttccagacactccagccgacggatgcggtggccttctcttcttgctgcatcagagctgcggcgggttttgctggggccttcttcaaacttggctccttttcgtctatttcatccacgacttcgcccacagcctctacctcttcctcttgcatatcctcctgtcgagaactagacatcaaccgcttgaagacctcgttgtcacgcatgaggttgtcgaatgtatcgaccgcactgatccgtccctcgtccataacgataattcgatcacatcgactgagaacatggagttgatgtgtcgccaagattcggcagcgatctttgagcaaaccacagattgccttgtccatgatgtgacgaccgacgtgtgcatcgacagctgacaaaggatcatccatgagcaccagctccgcatcgaaatatatggcccgggcgatattcaatcgctgtttctgtccaccagacaccgtgatacctcgttctccaatctcggtctggtctccattcggtaggatctcgagatctggggtcagagcgcatgcctcgatcacttgctcataccaagtctcattatactccttcccaaacaggatattgttgcgcacggaggtgttttggatccaggcgtactgaggacagaatgcgcgtgtggtgctcaggcgtacagtaccatcagtcacacgcatatctcccgctagagccgagagcaatgaactcttgccacagccgactgttccaattacggccaacagttcatgtcggccaacttcaaaggtcatatctttgagtttgaatggctctgtgggagtttcatcggtgttatcgtctttgggtgttgagtttcctgatggttcagggcgtgcagctgccttcttcttggctttgtctgcatccttttcgtctgttgggaggcgctcccaggtgaatgaagcatgttccatttcgattgcattctccatgttctcgtcccgctcaatatcttcattttgttcttcggcgagcaggaactcctggattcgactaaaagcagttgaagcatcagtcacttgaccgataaccattggaagcatgttcaacggcatccgcagggaattgaacaacgccaatgaggagaaaaccagtgcggcgttcaagtcatgatgtgatagtgcataggtaacgaaagacagcatggaggcaaaaacaggaatcgacatcgccacacaaagaatgccgtttcggatcgcaagcaaggtctggatggatcgaatttctcgtccgcgaatctctttcaaacggccgaggaaactgctctcccaaccgaagtatttcacgaagcgcacagcttgcaggatttcttgggtgagagatacacgctgatctgtaatcttgttgatactccgtcgtcggctgatcaaggatcgcacggcgaaagtcaaaaatggcattccgattaccagcaatgcgtacccagacaagcaactgtagccaatgttgaccaagagaaggatgagtgtcactataatcgagatgggtgctgcccaaatcatatggaacatgccacaagccaggttaatacggtccacgtcaatactcatgagagcagtgatgcgaccattgttccatccgcggccatcacctgccacaccaccaggtccaggtagcgcagtatctggcttatgctgtttccctttctcttcgggatttgagagagcctccttggttgcgtccagggctttgacttcttctggtgtagcttgccctcctgccttggcacgaccagacaatttcatagccttgttgaagatgtgggagatcagcactgcgcgaatctgcccaccgacaacttgaccccgatacaggaactggttcgtgcataaactctgcattgactgcatacaggtgataccaaccacgaaccccatacccctgccgatgtaaggctccgggagaccagccttttctgcgacataagcctccgtcgcgaaagcaatgaggtaccgagtcaaatacggcgcaaagaccaacaacagcgaactgagaagctgacagatgccgccgagcagaaattcaaatctgaacgtgtcgtacaatgcccagagaagcgggcggttgacgccactctcagtgcgcttttccaatgcggcgtctaatcggctggacaatacgtcaacggcccgatcgggattgacagtccagatatcctgcaattcgagtggacgtagatagcccactttcatcaacggggacatccattggaaggagataatactgaaaaacgaagcgccatgttctcgcgacacagatcgctctgttgggacgggtggtgtcttttgcaatcgaagtggattgagtctgcgataccattttttctttggcgtaggctgcacgtccgcttcgtcgggtgctgatcttaaggcatcggcccggagcttttcatccgccaccactacttcacgcagcggttcgggtgcggacatgctggatgttgaccggatactgaatctgattcccagctaggcagtgttccggagattcgattataaaagaaacggtgtgagtaatccaatcgatgtgggggtagccacgagctgctgaatgcggaaggcggagataatgtccggggataaagaattggggattgggaggaattgaggacattcaatgagattgaaggagatttcaggggctttaatggtttatagataacttatggcaaagtgaccggatgtcatgaaagggctcggacttccgtgtctgacttttttatgactccgtcaaacagggctaagcttccccagatcgggcttggtgggcttgtcatggcaaatgagagttaaaccggagataagtcagaggagaacatgcattcgcattcgtttagaacttcatcatccatcatctagtctcgtgggcagtcggcatcgcgggcttcgggactccgagtgccgacatttggattagtaatgtttaaataggcccacggaatggggaggatattggctgaagtcaagcagactactgtattcaaacctcaaattgttatggtctactccgtattctttgtgataacatacaaattttggcccccgaaaaaaaaaaaaaaacaattccatcgtcacgtcgtgggataacaagcagatccaagacagtaagaaatgtgctaggaagcttgtcaccaatgagactctccagtcgccatccctagcccagaggatatgatatgcatagtttacagatcatgagccctccaggaggcttctgtggttgtcgctgcgatctgtggacctgtgaaggttccgttctttacaaatgtatctagccatcaagctcaatcttgaccttcttctccgaaggtgggataattttgtcctcggaggcgcccttgaggttgggaagttctgtcacggcttccttgatgattccaagggccttttggatctcctcctcagtgatgacaagcggaggagcaaggcggatgatgttctggtgggtaggtttggcctggagaataagagttagcgatatccaaaccaatcctaacgagtagggactcgaatacataccaacaagcccttctccttcatcaacatgcacagatcccaagcggtatggccattggtcttcgactcatcaatgacgatggcattgagcaggccctttccacgcactgtctggatgaccgggctcttgatagccactagcccatctcggaataagtggccgagcttctccgcacgctcgaccatgttctcctcgcgcacgacctcaagcgcgcgaatagcaacggcacagccgagtgggtttccgccgtaagtcgaaccatgggtaccagcctcgaccgtgagcatgacgtccttgctacccagcacgcacgaaaccgggtacataccacccgagatggccttgccgagcaagacaaggtcaggcttgattccgctccactcgtagcacaacagcttacccgtgcgtgcgataccggtttggatctcgtcgcagatcagcagcgcattgtacttgtcgcagagtgcccgggcctcctgcaggtagtctgggtcggggacaacgatgcctgcttcaccctggataggttcaatcaggaaagcagcgaggttggggccggccgcctcgaacgcctcgcgtagagccgccttgtcattgtaggcgattggtttatttgtccctgggatggtgcatccgataccaggaagataagggccatagttctcgcgtgactcggggtcggaagatagggaaatggcggcgaactaatgcaaggggtataatcagccactgatgtacctttacgggtgtaacaaggaggggtcacaattcacttactgtacgcccatggaagttgttctccgcgctcaagataacggcttgattttccggaatgcccttggtcttgtatccccatttgcgggcaattttaatagctgtctcgacggcctcggcgccggtgttcatgggcatcaccatctcaaagccaaagtagctagtgatgaacttggcgaagcgagggaaaacgtcattgtagaatgcacgggagctcaaggttactcgcgaggcttggtctaccaatgcagcaatcaacttggggtggcagtggccttgattcacagcggagtaggcggagaggaagtcaaggtagtgacggccttcagggtcccagaccgaagtaccctgagcccgggcgaagacaacaggaagtgggtggtagttatgggcagcatattccttctcggactcgatagcctcaacagaagaggcagcatggtagtgggagaaaggcccgttggtagccatggtggatggtggatggtggattgcggggagagctaggaagttgggggaagttggaggatcggcaatggggtaaagaagaaaagaagaggaggaaagttgaggaaattgaagaaattccagagtaaaagaaacggaagacgagaagttatataggtaaaggaaaatcaaaccctttatacgctattccgttaagtgttaggcttgatagagcggatgtccgctaagtacaggtcgtgccgacgctgttccctatgcgcaggattaacctacacgggctccagtggctttgataaccacgatttccgattcgttgattggctatattggctctaataatgttccaagtattaatttgtctaatttaaatcggaaaaaaagagagaaaaactgggggtagaaattcacgtcatacttcggctatcgaaggagacaaatacatatacatgaaccttggagatatatagagaaataaagggctagttatgctccaagatctattataagccaaaatataaaaatagacaatgaatcgaaatgttagggcaattcgatcgctccgtactccgcagagtattttgaatctcggagtcggggcgctcccgccctctctcctttattgaccgtgtttgtgcatgcgctttgtgaggtcagactatcttgagccgcaatgtacgaggggatgaatgagtacctacaatattcttacccttgatcatgtctacaccaacttctccgcgccgcaagcctcaaccccgccgcgcgcccactcaaaacatactcctcttcctcatcgccttccgtctcgtcaatgcgttcgcagttcggacctttttccagccagatgaatactttcagtcactagagccagcgtggcagatcgcgttcggtcagggtcaaggggcctgggtgacatgggtgagtgaatgcgatcgcgcccacacatgactttggctaatatcgctcctaggaatggcggcaccaactccgatcctcactacatcctctcttcttcgccgctctctataaagtcgccgatttccttgccttcaccctcagtttgtctcccgccacacgtgcagagctcctaattgccgctccaaagacagcgcaggccgttgtggcagcaattggtgatttctacacatggaagctcgcagttcgtgtctatggagatgattctcttgaatcatggacaacggtatgtgattaagtatcgggtgttcataattcctctcggcagcaaagagcgcatgctaataaacgttcacagctggtcgcaactgtcgtaaatccctggcaatggttctgctcaactaggacactatccaacagtttcgaaacaacaattaccattgtcgcgttggaactatggccatggcaatggtcggtaggctctaccgccagcaatggccgcgacaaaaatactggcaatcaaatggacagggatcgaggtgtgattctgaggtatgactgaacctccaacttatgacaactgccactgacaatacctacagtctccacgaatgtctgccgctggcagcactcgcctgtatactgcgaccgaccaacattctcgtttgggcaaccctggccggcctcgcttggcttcggacctcttggccccagcgcaagatcctccttcttgaagttatgatttgcgggtaagtaatccaatctcctgataaaggacaagctgaccttttgatctggcaggtcgactattcttgcggtatcttccgttgcggaccgtctcttctatggaatttggaccttcccgccgctcaggttcctatacttcaacatcgcgcaatcactagctatcttctatggcagcaatgattggcattactatatctctcagggttatccccttctactgaccactctgttgcccttcgcgcttactggtctatatcgaaccttgtcaactcgggcttccacagtgggagacagattgcaggcggcgatccgagtgcaattggcgacagtatgccttctgatgccatttgtgctctctttgatctctcataaggaagtgcgcttcatctacccattgttgccctgcctgcatatattagctgcaccgcctttaatgcacttcttctacccagctatcgactcgcaggcatggggtcatactctccgcaggttgattctcataatcctcatgtgtgcaaacgtggtcattgcactttacacaactctctatcatgcatcaggaacacttagtgttctctcctatctccgtcatcagcacgaagcacactcggtaccaacaacaaaagcccaaacaaactcagtctccgaaaccggaatctctgttggatttttaatgccctgccacagcacaccctggcgctctcatttagtctacccgacaatcaacgcttgggccctttcgtgcgagccaccgatcgatctcaacgcaactcagaaagccgtttatcgagacgaagcagatcaattctacgatgacacattccaatttctacgccagaacatgactggtggtctccgtcaccttcctcgacgaccgagctacgcctcgcccgcgcattattctgtatcgggaaagaaccccaacgagaccccacaacatgaatggccggactacctcatcttcttcgcccagctcgagccaaccctctacaccatactgcgtacctcgtcctatggggagtgctggcgcacctacaacagtgactggcacgacgactggcgccgtcgcggcgacatcgtagtctggtgcctggacacagtagagcaggactcctggcgctcctttgcgcaacgccaagaacaggaaagccgagagaagcaattcgatcgtatcgtggaagcattcaagagtgaggggcgcaagcaaaaaaagcggggatggatgtcctcgatgccttgggcccctgcgcctcctccattgtttgcgtcgtggcgacattcattggggtcgtttttctcttcgccttcaaaatcatcaacctcttggccttggcgtgccccttctcgttgggagactgttgtatcgaggctgtcattctcgaagcagaagacaggttggcttccttcctgggtgtcgagttggcttcctgggttgccgtcttggttgggcggagctaaaaggagacctacggaggcagagttgtggtcttgagatcaccccctcttggtctccagctattttgcattatatgtgatgctgcgaggattttcctttccccttcagcttcataccattcacattccctttctctttctctttggtctcttctttcttctttggacatatagccccagactagatcttcagtacgatattctgtcttagttcactagcaatacaggtattaattcgaaatttatatgtaaaacaaaatacaacatttatgtactctttgactcgctaaccggaaaccaaaggaatttttagtgtacaataagaaaatgacagcagggaatgacaagaaaagaaaacagatgaaaatttaatgagtggcaaacagacaatgataatgcgccggacatgcacagacataacacgtctcgtcaaacttctatatccagatcagtatacaagtcaaattgaaaatcaaaaccaaaccaatgtccatacctatgtatttacattgctcggccatctatctgtgtatgatcgaaaatcgaattcatagaactcaaccatagcgagcactcagactagcaaaggcatcggggctatggcgaccattctgcaccccattcacatcgacgctcggctgactcatgtgtgtccgaggatatgccgagttcgcgggtggggggcctgaaaagggggactggcctccagcaaatggagtactgtttgctcctacaaaggagggggcgctcattcctgagaatggggagttgttcgttcccatggctggagtggttccggaagcagctcccatcccgggttgaccattcatgccgccaattcctagccctgagggttgctgctgagatgggttgatacctgcttgtgcggcaaggccggatccgctgcctgtggaggtggtgccaaagaatgggttgttggatgtatcaggctgggactggaaattttgctggggctggagttggttctgattctggtgctggaagtttgtggcttgttgggtctgaggcatggagttgtatgggtttgatggttgagagtatgggttcatcgtgggggcttggggttggtactgttgaggttgttgaggttgttggtgttgctggggttgctgagtctgctgagcttgctcggggatggatgtcatattagactgtgtaggacccatattgtacattgaaagaatgttgtttctgtccattccagtgggttgagccatagattgctgggcctgctggggttgcaggtgggactggaattggctggggtagccgcctgcgccctgtggtgtgttgggcgccgcttgctggaacgggttgtgagctcccagtccatttgatggctgcagctgttgttgctgctgctgctgtacttggagagaagcattcggtccaaatggcgaggcggaagacatgaccggcatagtatttgcatggcgaggcggttgaaagccacctgggttcattacgagcggattcatttgttgctgttgcggctgcatttgttggttttgaggcgcagtgttgaagaaagggttcgtttgcggtgcattagggttggggtatgtctgattagccaagccaccttgcggctgcggcggtgcctggtcgaatggattgtagctattgtccattggctgaggcgaggtaacatagggagaccgcgagaatgtcgctgtgaccggaggcgtatagggcccctgatatggagagtgctgcatggagcttgtctgattcggatatccaccagtagagtgagggaacaatggctgggaaacctgcaggccctggaaaggctgtgtagatgccgggttcgagttgagttgatcgaatgggttgtacggagtagtctgtggttgaggggtttgcgacttggccacaggatttgagacagcccgatcaaatgggttgttagaagcctcagggaatgtgttgtcggttgtgacggggaatgggtttttggacgtctcaaacttcgagacgcgtgcggatgcagcactgcttgtcccggccggggtcctggctcttgatgtaggggtgcccccctcacccaacctttcaagtgtttcgaccgctcgatccagatcctcatgcagtcccttgagaaccatctcgtttcgtcggtcattggtgaatcccatctgctgcaacgccgccattttggcctcaaaggatgccgttgttacatcagcgacaggcgcaccaagtcctgttgtcctcctggatggcaatggtggtggtgaccaggtttcatcgtccgagtttggcgaagtcaccttgggcttgccaccaaatcggcggaggttcgaggtagaggatgacgagcgtagaccaaacttgaaaaaccttcctggcttgggcggaagcggaggaggagaaccttcaggagatatgtcatagtccctccttcttggctgcacgggggactgggccctttggctggagtaactcgagtcctccctgctcgggggctttggcttcccattttccaaggaatggtgttgatatttctgccggataaaccgttccatgcacgcatcgtcctcgtccacgtcggtgggaactggcggcttgatgccgcgcgggttgttcaattggttcataatggtgttaccatgcgctttcatgttctgacaaagtccactttgtcagctcgtgacctttgctattgcggggttccagattgtgctcacatcaatttggtctgctgtccatgtgtccatgctcaaagatttaaccttggaaatatgtgtgcccagctttcggtgcagtgtggcgcaacgcatgcaaaggaagatgccaatctatcggagacaagcagtcagtttgtgaattcgctcggaggtaaaggaagcggtgacatacgttccaactagcccatcctattcaaataacaattagcgagatcaacaataaaagtctctggggacgaacctgggttccaggcaccgcaatcggcacatcggtcattgccaggaatggtccggatcagctcccccagggttctttcatgccgcgcctgctcgcgcttgctgataccgggagtcatgatgcagaaaaataattacaagaacaaataaacagaaggagtggcagtaatacaaagtggaataggggaagatttctggttcccagggcggagaagggtctcaattgacgtccgaggggcagatcattccaaatgagacatatatgtaccctgcggagcatacggaggcccagggggtaaagaaatagcagagtagagagaaaagaaagatttagacattttagctcagttgttccaaggttgagttgattaagttagattgagttgacaatcccattctcaatttctttttttccggcatagctttctgcataggcccgatcttctagaacactttaaatgcttctgtactgcagagactcgagcccaggctcatacgttcggaaggataagaagtcacggaatagatatatattattgatactagcgagaagaaaaattggcatgtctggacagcaatgactcgcatctaccaatgcgcctaaaggccgaagccttttcggagccgtcgagaagtcgtaatgatatccaggaatatcttctagtacgccaatatgaccaaccatcctatgatagaggaattggcggttgattatgcgttcgtaaagtgtaaagaaggaaagtctccaatttgcgcggaaattttcgatacaaaagggcacggtcacgtggctgtactagctcgatcacgtgtcctggagattgagataaaaacttttcacctcacagcttgtcttcctctttaaccatcattcgtgtgttgaagactcgagactccaatcctttaatgtcggggattgtcgaggacttggatccaacattcggatgtaaacttcaaaccacataacccgcgcggtgcctacctgtggcactgttcgtctcttgggtgattttataatcgttcgttcgtggaatatcaaaaccaaacagtttttagcagagctgcgtctactccaccctggtgttcatatctattgaacagcaggacttttttacgacggacatccccgatcataatggaaatatattttcaaattcactcttgcgtctatcatatcgtattacttgtcatggatcattgatcatcgtacttattttcaaggttcctcccgagggcatgtacggggacttacgagtaccaacaatagcatttgcctatatcacatgaccacccatactcggctgaactgattttccgtggaatagcatgcgaacgacagctgtagcagtgtttactcccatatgtagatctttcttctagcgcataagcaatggatttcgtcaatcttgccgtacagcaatctgatcggattttctaggtgtggattcaaaatctgctcggaaattcacccaaggaattggcaggcaagcttgcttctcgacattgcgatggtaaacctttaacagcttcgcgccttatgaatggtgcattcaatatatgttaccgagtcgcctttgcaaatggctatcgcgttgtggttcgctttactgccctcggtcgggtctctaatattccccacaacatctccagccgcgaacgttttgacaatgcagcagactatttcgagaagcttgctcgtcaccagctctaccatcttagactacaacgcaatgatacaattacaaatgaggccgactgccgcaagaagtatatcacgcgatgtctttttcgcaagttatcacgtcaggtatccgaggaacactgcagtggtccattccagctttattgcaatgatcttcgcccttgcaatatccttgttatgcatcgaggcttatcgttactggggtggttgattgggagttcatctatgctgcccccgtttaattcacaatgactgctccttggtggcttttattagaaaaaccagagggctgggagcctgatctcgagcaatttctattgcgttttatcccgagatttcgcactttgaggttctcaaagattgtgaggccagaaaaattcaagactgctctttgtcacaatcccaaagactatcgatcgctatggagaagtcattagaaactggattgttctggatttgcctcgctttacgatacagctctatgttcgatgaaatttattggaatttcatcgatacaaaattccatggtccatttacaacgatcgaggatcaacctactctgctcagtacagaagagcaggtagaaattgatgccttcgtggagactaaaatgcaagaggcaagcgagggcaatttggttacatatttacagcattgacgaactagttgatctataaacatatgatactgtgacgcgtttggaagattcattgagagcaagcaagaaaggacaggttttcaattgcaaaggaatgttaaaatggagttaataggaagcttagaagaaatggtatggacttttgcgttggttcgctaattaaagaggagaataaggcatatttgttcacgctcataagaactatgtatactgcgatcattcacactgctaataaaacaacgtatgctctgaccagagcattaattgatacatttaagattgagcatttatcgacttttagtggatcacacgacagcactgtcatagcaacgtacgattcatagacatagtagatagtcagttaggaccatgggtaataaaatcgtgaccattagaaacggtcagttgtgccaaggaatctcgaactcaaagattcatagatagcttatttgacgtcttcactaattaaatatagatgtagctccgtatctagacctcgattcttactgagcaaaccacctgggcccggggccagccgttcgatcaggtaagcagatcagtggcgctgtgggtcagcattggccaaacagcgctgggccgttaataatacatttccgacacctcgggatgtctttctacttacgcctctggtatcaagtctggattgccaataaatgaggacaatctcctagggctacctacagatagccacagtgtaacagtcaacaaaaatgcgagtcatgaaagtctggggttggtgtacggtgatgtatggtgatgtactggaatgcggagacgagacgaaacgccgaggcaatagcatatgtggcccccttgattggctgtgattccatgagcttctgtccaatgtaccgaagtattgaaatcagggctgtactgacactagaaatgggacagcagtacaaatcccccggttcttcccttttctcttcccttgtacttataatcccgcctttgctttcccttccttgagtgcagactcattcgacttcctatctcgcgccctctccgtcctatcacaatggcttcagctgccagaactgcttcccgggccttcctgcgctcgaccccagcgacttcctctttccgtcctgctgcgcgcagcacccgtttcgccatccccgccaatggtgtccgcgcctctgctcgtcgtggatatgcttccgaagctggctctgagaagtctagctcatcctttggcctttgggctcttggtcttggtgcccttggtgccgcaggtggagcatacctctacctgaacgactcctcccccaagggcccgttcgtccccacccaggccgactaccagaaggtgtacgacgctatcgcttcccgtctggccgacgagaccgactatgatgacggcagctatggtcccgtaagtgcagtgcttctgttcaaccccgcaatccaagatcaaagagctaacctagacgtttttgttgctctcaataggtcctcgttcgtctctcatggcacgcaagtggtacctatgataaggaaaccggcactggaggcagcaacggcgctactatgaggttcgccccagaggctgatcacggcgccaacgccggtctcaaggttgcccgcgatttcctggagcctatcaaggctcagttcccttggatcagctactccgatctgtggactcttggtggtatctgttccatccaggagctaggtggccctaagatcccctggagacccggccgtgaagacatggagatcgccgcctgcactcccgacggacgtcttcctgacggcgccaaggaccagcgtcacattcgcaatatcttcggccgcatgggcttcgatgaccgcgagatggttgccctgatcggcgcccatgctctaggccgctgccacaccgatcgttccggcttcgacggcccctgggacttcagccctactgttttcagcaatgagttcttccgcctccttgctgatgagaagtggatcccgaagaagtggaacggcccggctcagtacactgacaagaccactggaacgctcatgatgttgcccaccgatatggctcttgtcaaggataaggccttcaagaagcacgtcgagcgctatgccaaggacagcgatgtcttcttcaaggagttctcagatgtgtatgccaagcttcttgagctcggtgtgcccttcaagactgaggagcatatcgtattcaagacttctgattccgagtaagggaattgctcgaaaattgcctaatgttcctgtctcctttcgtatatacctgtgttgatatccgagtcattactcactaagatcatttttcttgttgccaatggaagtttagattttctccatatttgcatagattagtagccccaattgtattcacagcatgtaagtttcgccctgagtaggatgtagcattagcattggagcaattattcaatttgaatgtagaacagtataccttcatgaccagtaatgagaaaatgaaagagagaaaagaaatagccaacgcttgacatcaacaagtatgggaccgggaggccttttcccaaagtggcgtgcaagggcgacccgccattttcaaattctcatagaaacctctcagtaacaaagctcaccaaccccgctttgcagcacctgctaccccagattatcgcgataatttcctggaatgcacgcgattggcctctccactagactccgaggtctcaatatacagcctggcgcgtacctccggtcgctcgaacggaaacagcgcaatcagatacgacgaacaggtcctgaacagaaggaggaatttatgttgtcgacatgacgagaacggcgaacgctgtggatctatatgaagtcctgtctctctcattcacagggtcttcgtcgacagttctctccaagcagcagatcaagatcgcataccataaagcattgctacaacaccatcctgacaaggcgggtgctgtcgcaagggagaccgggctaggcagatcgactaactctacatctgcatctactccgaaccatctctctgccagctccgatggcaactcatcgcgacaactgtacaccatcgaccagattaccaccgcctacaagaccctatcggaccccgtcctccgctccgaatatgatcgctctctacgtctggacagactgaaggttgcggaacgggagaaaaccggcgatgtgttccacactggcttggagattgtggatttggaggatcttgactgcgagaaggcagagggcggcgacggcgactgctggtttcgcggatgtcggtgcggtgatgagcgcgggttcttggtcagcgaggaggatttggagagggaggcagagcatggcgagatcattatcgggtgtcgcggatgcagtctttggttgaagattctctttgcggtcgaggcagatgaaggatgaagggatgacttgccatacggtctgtcttttcctggtcatcatctcttctctagcataccgttgagattctggccggctctgcagctcatatcttgtcgctgtgcgataaattggcatcccgtggtttcatgtctgcgttggtctatgtctcgtccagagactaggctcgttggttcagacagggtacaggcttggccctggggctgttcgtgttcttctatcatgaacattcatttttccgaacgatttctcttgcgcacttggatctcccccaatctcttctggtttgtacacaccaatcttgtgggaccctgtgtaaaccaagagcttacaccaagcgtgatcttcgttttggactcatcgcacgttgactgagtaagactcaagcaccctactcaatcccaactccgacctcttgtcttcttgttggatctgtcaatcatgcatccaacaatgagcccgaatgctgtaccatagtaccatatatttacctgttaacatttagttctgaatctagataaggatacactcgtttatatatttattttataccttcccctagaggagaagaacaaagatgacaaacaatatatatccaacatcccacaagataaaaacacacttggtaattcggcattcgagttgacctcagtaatcctgcattttcaaaagtatcgaatacttaccatttgaaagaaaacaacaattagttagtatacgttcctggcgttgtccatatgaggttgatggtagaggggctgatgacatatgcggaggcagcaaaacacaacctcacatctttccatcctcttccaccctccattttacactcattccccccaacttcgccatgtctgtcattgagatctcatcgaaggagcagttctcgtcgctcctcacctcctcccgtctggtcgtggccgactgtaagtatttgctacagcgcgatcctgccccgccgagaccctgtcttcccctccgaacgactagagcttcgctaaccttggcctgatacatgaacagtccacgctgattggtgcggaccatgcaaagctatcgcgcctgcgtataacgcgctggcaacccagctctcccgcccgaatcacatcacattcaccaagatcaatgtcgaccaccaacaagagctcgctcaagcctatggcgtcacagcgtatgtgaaattcctcccaacatcagaatctagcctaacccgcgcgcaaattctaaaatatcctagtttactaacaaatgaacgatatctagaatgccgaccttcatcgtcttcaagaacggccgcgtgaaccaaacagtcaagggcgccaaccccgcacagctgaaccagatcgtccagaagctcgcatccgaggcaagccagacggacgatgcagcaggagccggtgaaggaagcagctccggtgagctctggctcggcagcacagtagccaagggctacagcgacatcacagaccaggttaacgtgaagggattggagttgttgaaccgggacacggatacggcagagccgcgcgctcttttcaacagctcgaagccctccggactcgcagcgaatggcaagggcaaggctgctggccaggcggattggacagagagtgacacggacgagcagctgatgctgtacatcccattcaactcgatattgaaggtccagtcgcttcagattacttctcttcctcccgcggacgccgatgccgacgccgacgagacacccatgcggcctaagaacttgcacatctacaagaatacttcgcatgtgcttggattcgatgaggcagatggtattccccccgtgcagaaggtggagatccagtctggtgattgggatgcgaagaccgggactgcgacagtctccctgcggtttgtgaatttccagaatgtgacatcgctggttttgtttttcgttgatggggatggggacagcgagaagctgcgggttgaccgcattcgcattattggcgaggcaggtgcgaaccgatctatgggcaagctggagaagattggtgatgagcctggcgagtaaagatagactacggagaaaaaagcctacgtacgctatggagataagaattgtgagctgtcttgtgtgatgaattttcaagacagagcttggggggatcaacatttgtgtcgactttatgccagtgatgatacggagtacagttcaacgtctaatgagagagccagctggctgtagaaattttgcaaaatttgatgaattgattccattgtatctagagctatagaaaatacccgagggcataaaaaaaagtatgtttgactcccaccaggaggtcttatccttgtgatatcagaaagacccataaaggtaagaatcaatgtgcaattcccttcgtctgtggcgcaactgacacctggggtacatcactgaaagccagactaatggccgtagatgtccaggcaacacgggttatcgagttgcgccgccgcacgaagaagaaaagaaagaagaggaaaggcgccggttgagaatttcttttatgccgggccccggagatttagtttttccgcttgcctttaacggaaacttccaaggatttcggcgcagagactttcattatgtaagccatatgcgaggagccaatttttttttcagttgatgctccttccttctttttctctttcttccataaacatggtcgatgatgagaaatatggattctatgataggaagagactgactccttatgggggcgtgatctcaattttaccattcctgaggcccttttgctgtttattcctgttggggagctcgacctgcaaccagggcgcgcttcgatatcagctcacaatagttgcttccccgagtcttccaagttaggattgcgttttaatctctcaaaccttgcagttagagttagtaacgcatgcacgagcacatccattccatatccatatgcggaacatctattcctgtttcttgatcgtaccatatagatgaaatgtctgacccgaaaccccatgaccttcgaggccaaattgccgtccggatatcaccgttgagacgaaaactgtacccatcggagaaaaaaatcagacaatgtcgcacaagcgtcaaaccatcatggagccccgtatgattagcgccgaagctggtacgcggagccgcaaatatatccaattcggcccgatagctacactggttgatgaccggatgcacccggcattctcgccttctcacaatgcatcccgtacggagtatagccgaaagaggatatagcaggtagctgtatggagtcctcggtatggacacagtgattacatccgcgacccgcagatggagttggagctcttggcactctatttaccgcgatgcaattagttcatctcgttcgtaggagttgacaggtacgtagccgagatcgcaactcttgttttttttttctcttccatctccatactccatccactccactgtaggtttggcggatagatgcttgttctaggaccatggactggcttgtggtgcaagttgtgacttggtgggtatgcggcaatctgtgttttggtggctgtttcatgaacatcaaagctggattgcctgatcgctattgaagattcgggtttgccggaatccacggtgatttctcaagtttaggtttgcttgccggttccgttgtcttgactatgcgcgcttgtgtttgggcttggcatggagaggcttgtactagctatattgaggatatgagttagttgtgttgtgtgttgtacaacttatgttgtagcgagttttctttcgcgaggtaccttctacctacctataacggtaccacgtcttggattcaggttctgtagaaacaactgagacccgctctagcccgcccggagatgagcaccgtccagtgttttgctgttaataacgcacgccattcagactgtgtatccactggcgatggcgtgtcttcaacagcgatttagactggatagactcggactggccgggcgctggacagcagacaagacaaagcaagacaccggcttggagtgaacagagtcacggaatataatttcatctcgaatagaccacgggaggtttgctgtttcatctcagcttaggctgtgatttcagcttatggacctagaacgagctccaaagtcattgatgagatgttgtgttgggctttacacacacaccgcaagagacagagacagccagcgtgttcgcaaaatagcggtcttgtctcgtagttcagagtcatcgccactacggagtagctagaccgaccggcagtgaatctgttacgtaccaaatattgcgcgggaaggtaatcttcttgcctttggggttagacgttagaaggagccacttttttggtttcgagactttatgagcctaagtcctgcgacaatcagattctacccgcgtccaatcgaatacacggtgtcgtcatttgatcttcttttcagtaatatttgcaacgctcttctgaaatgtgttttttttagggatatatgctccttcttagacacgcggaaaagggcggaaaagggcggaaaagggcggaatttgtgaaaacgacttttctatgcataaccttggactcgccgagcactacatatactaactctttgttagcctagggccttctattcctagaaatctcggtcctaatagaccacatggtgattgcaggaaaaattcaataggatagttaggggtgatttaaacaacgcaaaatgtggagtttgtacctgaagtagatgggaactggagccggtcgtcgatcatgatagttcagggacaaaggtaggcagtcgccgaaccggacctctccgagttggatacagctgatacgcttaccggatagtaattagtacacttctattctgtatactccacatgatgtacacgctagatttgttcttcggggacttctagtgacttgggtggggaccgacgcccatagactacgggatagcgcgatgttggagaaggtttgcacctcatgtgaactggctgcaggtgtggaatgtttctctatcatcgtgaagccgcgtacgacaatcctaggcctcatcgggaatactccgccagatgggtacatagtgaacctcagtaccagggaaccatacaagattagatcagatagggcccggagaatcacatcattctggactgggaccccattagtaccagagataacgatactcgtacgacgatctaattattttccgacccactgcgtgtcttggggacagcccgataattggatgaaactatacaatctacggagtatgttggagtcttggtacctgagccaaggaagcattccctttttatattggggtcggtccagggcgatagagatggttccacagaaatgcgaaaaggacttgaaatccaagtgagctacctggttggcgaggccaggctatgccctaatgcatattcccaccacgggctggcaagctatctccgcactcatatatatatattgccgcgtcgcaggctcgtgccgagtccaaaaatccttcgatcgaagctggctcgttgtaatttgtccaatttgtctaatctgtgggctgtaggccgcctgtgtggagagtggggatagtcttcacgcaccattccccattctgccaagtatgctgtagtcgaagcttcataaaactctgtgcctgaagattgcaggatacataataagaagaacgtcgagaaccttccaccggcagagttagcttctcactttacctgatagagtgttagtggtagcttgaaccttccaaagctggaaatatccgaaccgtcgaggaaccatcgcaattaacgagctgataactccaagtggaccgcagactcgatgcgcagcagatcttacctgaaattatccctggcgccccccacgttcttccagccacgttagcacgccttatagttcggtagttattaagtttgatgtgcaacactccgtactccgtgcaatgccgcaccttaagaggtagaaagagctcgaaagagcaagttgcaagcgacgtacggctgatcaattggaggttatccaggtttcagacgatcggctcagggtctggatgccacactgggtctagtgtctcgggtgaagtagccagttacacgcggtcctcgactgactgagatcgcgatatgactctggagtccggagtattttcccggataccgaggaacatatctgaaacacatgcctagagactagcacgccactcttttgactgctaatgctgtcggagtgtggaagttgatacaaattttacaaattagttcttcctgcaattgtgccaattgcgtcgcattgccagacctccttctacagagtgctttgacataggatagagtacaatgcaacaccacggactccgtccatacacagtggtagcgattgcggggccgtttaaatccctgattagccaaaccatgacgatttacccgcgaagaacgatgcgctcatcctctgctcaaccatggttgtgcgactgtgtggaaatgggatgatcgagttcacgccccccgcactttgccgtatgtaacacccatggatggaccgaggaccttggaagggatatttttttttggaactgtgtatctctgctccgtatgggcgtagcagtggcgtcccgtgcgcaactcgcctaacagtagttggtggcagtgacgccacatatgtttggcgtatagatagcgaggtggttttgcggaaagcgccttgtgttgtctgattgttatattaaagatagccgaactgtaaccacctgatattaagaccacaccagattgatatcgactgagatactgagatagcaagatagcaagatcggatctcaccactacaacttatgctgtgagggcgaaacctcttagttctcgtatcggactcatttttcccgattgggaagccatctaccttccgccatcgaggcagtgagctattaacagctaattaatttcgccctttgttattattagcgattccccgtcctcgcctcttccaacagtctcctgctcattccagaaaacttccctaaccggccattttgaggccagtgccctccccaatggggaagtatgtccagaagagagaggtacaccgcgaagtgcaaagtatgggctccgctaaaaatgcgaccatcgccaataatgccccccaaaaagagtcggatccattctcgaaacgcgaaactcgaaaataaaaagagctaagccaagaccgggcccaccttggcgtcaacagcctcagaaaacgcgtgttcttgcccattctgcccagatacggctgcttcggacggtgtttcagattttaacctcaacgtgcggaagtgcccgcctaattatcctgcacagttgactaaattaattgcaaatctcaaacaatcaaattcccgagtcggtttcgggggaagggttgtgtacgtcacaaagtctcgctacttttcgaacactttccctcaaggtcactgctatccgctttagcttctttttaattaggtacatgcgccacttaattcgttccttcgttttagcgtccagtggccaacggtcataaaatctggggtccttgcgcgtcttgggcatctgaattggggaacttctggaattggaatggttcctgtccactttggagggctagtaatctcaagcgccccagcgctggtacccgcgctggtctcgggatttgacaaccctacaccctacaccgtagtacaccgtagtagagcctacaccgtagtagagagtgccagcaacatagtagtcggtctggagggctgggtctgtccattattggagtatacggtatagcatggcaaacactggagacttgcaaaagcctttttccgctccatggcatgattgagaaccaaactctttcaatcctttaataataacatatgatgtattgtatgttgtttacagagtacagagtactacgcgaacaatgaactttttttttttttctagcctctatctagaagcctcggtggtcccatgtgaatggcctcggtggtcctcaatggcgaactaatccctgcgagtcttctgccaagaaccgttgacaaaaacccaagcgcagaagggccgtgaattccttccggatctactatccacatctctttgtgacattttgcgacattttaagtctcatatcgtctggtgtatcccaaacccacaatccttgtggcgctggcacctacgtttgcggaatcctattctcctttggccttgtggattgccaattgccaattgtgggtttggatgtgtaggatacggtgaatccctggtggaccagggacgttatgctcaaacccaccgatgcatgggagatcctcaacggtacattacttccgtacctatcgcgacatccaaatctgaacccttgctgcgggctctctcggtctcgccccctccggggaaagactaatccgagactctgcatatatctcgtccggggttaaccatgacagatagactgatcaatttttgctgacgggctgatcctcgaatatgggcatattatgatcgccaaacggctacgcgcatcgcagacgggaagctctcacagacatccccatagttaaccgccagcagccgagcatgattcgtcggggaactgggaagatgctcgcatcctcggccaagcacaggttttttttatttttccaaatcgcacggtcgattctgcgatcagggcgagtccattttacttggtaattgggagtagatcaaaattgatcaatttgcctctttgttttgctttttcctctttctctctggacaaagaagaggtgtgtactccgtacaccgtcaatcgtactccgtacacttcctccacttgggtctccattcgagagccacttgggggggtccggcttccctggatggccttccgcggcctttagttggaaactaggcactgcccgcccgcttccatctccatgttctccactctgcctaagagctggtgtcaaggctagaagggccgttgggtagaagtgatttggaaggtagcttgttttatcccgcgtggaagtcttgatttatttcccctggacttttctcggggggagctctctgataggctcctgggcgtggagctattggagctgttggagctctcgagtgacgactagggaaatgtggacttcaattcaatagcgcctagatttcggcttccggcttcaatccatcgttctacataagcgttggcaacgagcccgtgggattcgtaaaagccaaaataaagtcgtgccgtctgtgcgacaacggtggcggcagggattcgggctatcaaaaagtaagtccatagtctcaaggccagggccaaattttgagatctcgagtcggaactctgtaggctcacggaataaagaaattgggtggcgcaaaggtactacggagtaattagcatcaagattagaaagtggatggatatggaccttggaacttctcaaagaaggacttgacagccttccatgcatgacccttttccatgtccacgggaagtatctaagcccaaaaggaaacactcgaggcccggagacccgggtgtctccagtgtgtctgtacgagtacggagtctccatacttcacaccgtagactatctttgttagagtggaacggcaatcaatatctatcagtgactctccaatttccccaagtccacattggcgtgctttgtatgtgtctcattggtagcggatgaagacaaatctccgctggcgccgacgctttgcctgtgaagggattagccaattggaggggcgcactatctttagaagtggccaatcacgcacgagatgctccgggttcctgacattccttaagtgccgggatattagtgtcggtttttggtctggactcgagggagaaaaaaaaagggacgttggagattaggattagtgacttggtgacttgggaaaatttgaatgattttggtggatagtttgtatcttaatgtacggcgtagagaatgtgccacgacctggaaaataagaatagaactggaccttgcttgcgtggccggttactgtatgtcattgggctgtgttagtcgatgtgtcggatgatgcatctgtttgtgcttccgagttttcaacttgggatgagaccggtcacagacaacacatgcctaccatagtgacgatgacgcccatggagtgcgctgacatatactaagcgcatattcccccggatctacaggtcaggtcagtgagacaaaaagtgctatcacatcaccctgcaaatcggaacacatcacttagcgaccacattgacccaataagatgcatcataggtgagaccccattaacgagcatctcactaatgtactggacttgggccccaaatacaatataagcaccaatattagccttatgtctttgatcgtactttagcatatgtagtctggggatccaatcaatggacttagggcaaccgaagtcggtacgaagtacaccctcgacgatttgagcatcaaagggaactgcatctgagccttgcctttcgagggccaagcacccaataagcatgttttatgtagctgcctgtgtgatcttgccccccacaggctggttcctgcagtaggccgcacaagtagactgaaatctcgcctttctcggcttgcatattgcatacaacataggaattagtgtttcctgtttttttttctttcttgctttgacgttttgctctgcctgaaatattgatgccattgacgtgtacaatgtgagatttgtctgtatggaccaaatggcatagcccttgcagcgaccggacaataaacacgggtttgtttacttccaatataggacccatgtggcaaaccaggtacgtacaacttacgaactacgaacgttatactccatactctatataaagatcttcaatatggatgggctccgaccactttgatagggttcaacggcttttgattttcggtgatgaccgcaccgaggggcaatacctaggtcatatgaaatttggccaggaatgcaccgagtaagcactgtacggccaatgccgaccgtttcacgatcgaaatcagatggttgcacggtggtcgccaccgttgatagcctgatcggcaagtgctgagcgacttggggatgggcagcctaaactggcaactgattggcggggccttggggtcttaagttttccacctgttgatcacggcggaacataccgtctggagtggacagatgggaagggattcttccgttgttaatttcctatgtgcagttggatgttgcctgccattagaagctttgcaaggtacctaggtaaccgtacagggtactccgggggtacattggtctgcggtaccggacgggatgcgtgggcccccaatgcttcggggctattggttcccgaaaaagcaatgcgaaaagaagaccgtctgggttagagcgctcttatttgtccgacatcgccttgataagacggattgagcaattgattagcgctgtcaccatcatatagtccaatggtcatgcacctcgtggccacacctcaatttttagatcaggtctcgggccactctttttgcctctgaggactttgtccaaatcaaaaggacggccaaggtatactgtaaacatgtaaacagccccggtagtgattgaatggtacggccctgcacttggccgaggtgtaggtacaacaccttactcctttggggatgaggaccgaaacggtacttgggtcaagataataaaaacgatgtattatcataaataaaccaaaatatggaaattcaatttgatttaacttaattgttcctgagtgctccaccccaccgagcccactaaactcctccccaatcaatgcgattggccgcgtctgacgggactgagcacttgatgtgcacccagtgtctttcgcaatcccgccccggactggaatatctcttattcgattattcgattattgcattattggtattttcgatttaatcggaattcctgagacaaattaaaattcagaaaagaaaaagcacccggttcctggcccacacccaaactagtgacccggcaagtagaaaatagtagcagatcactcatttatccaccgtagcctgctatcttccctcaattgtcttctctcgctcgctttttttttatattttccccgctgtctattttgcatactcacactctctctatccaatcttttttttatttgtttgactattttgcctattttgggttgggggtttcctattggacttatttgggatcctctcttctatatcactcactctccttcctcaagtactttgtctcccggttcccagaacctgtccttcctttctcgacacactcattcatcgtcaacacatatacaacctaattgcttagtccattcattctttcggactcgaatcacttataatcctactaatctaccgcgggagacttgcaattggactttcaaaaacacttcaggtatgtagtatatctctataacattggtctgcctcttgcttcttgcttctaactcatccttgcagcatcacattcacaatggactcaccatacaatatggcacccacctcggtgcaaggccagccattcgcatactactccgactcacagagacaaggccactaccagtcagacatcccatactacagccagatgcagtatggccaagagcaaccgctctacacgtcccagcccatgatgaacatgcaccagatggccaccaccaatgccttccggggagctaccatgagcctgacaccgattgcctctccacagccctcacaaatgaagcccaccatcatcatgcagcagggttcgcccggcttgatgcccttggacactcgctttattggtcacgacttgtactccttcccctcgactcctccgctgtccgcctcgggaagcaccatcagcagccccccgtctgctcatggcgccctaccaaccccgattcatgacacatttttcaccttcgacaaggtcgagggtgtcaaggagggatgcgagaccgacgtgcaccaggagctcctggccacaccgcagtgggcgcgctctgattcgcccccgatgacgcctggtgagttttatagatcacactttgataacggaatgtggatcgtgggaagcaagggcgaaaggctaattcatcctacagtcttcattcaccccccttctcttaatcacatgcactccgaccttctgtctgcaacatcctgcccctcgctttccccctccccctcacccgtgcccaccgacattcttgcctcccacaatctgggatcgagccagtctttctgcgatccccgccagcttaccgttgagccctgtgttcacgttcacgcacaggatctccctcctctaccgaatctctcatgcgaggaggaggaacctcgcgccgttgttggcagtgcgtctgtgacgctccccgttaacgagaacccatctccctctttcagctcctcgacccaggatcctctgagctcgctgccgacttttgacagcttctcagacctcgattctgatgacgagttgaatcgcctggtggaattccaccctgccgccaatgccgtctacatgggtggcaagcgccagcgtatgcacgcctacctggtggaggatgatggattcctgagcgagcacagcctcgaagactcagatgattccgagactttcttgcccaatggtttgccatcctttgagtggacccagactgctcaccctcaggccgagagcgaggaggaacccatcgaggagcccaagatcaagaagcgtagcaaccgcaagtcccgtaagaccgctgccgacgaagaggctgaggcaaaggcgctggccgcctgcgagtcctctggcgactgctgctctgatgacggatcagttgatgattccgagtctgctcctatctcagtcaaccgccggggccgcaagcagtctttgaccgaagacccctccaagacctttgtctgcactctgtgctcccgtcgcttccgtcgccaggaacacctcaagcgccactaccgctctctccacactcaggacaagccgttcgagtgcaacgagtgtggcaagaagttctcccgcagtgacaacctcgcacagcacgcccgcacccacggtggtggctccattgtcatgggagttctggatgcaagcgacgctggttctgtctcattcgacgatcaacatgacgctggtgcccttggccaagtcatgtacgaggctgcccggtctactgaagtcatcggtactccccccgtggatcgccgagcagcgaagaagcgcaagcgtgacttgtcctaagggacttttcatgatttttcttttatgagaccaggagacttcctactgcatatataatacatacattcttcggtcggagtcttttattgggagcttgaccatattggtcttgattgggtttggcgtccgggcatttacactggtgtcggaaactggatcatcggtgcacagcaacttgcgttcccttttcatttagcgttttgacatatcgcacggggacacatacacacaggctggattgcctcgaacggttcttttggtgaaggcacatgggcgcagaagagtccaggaagaaaaaaaaaacgacatataaagcgatgatggcatctgtcttcggcagtgctgggaatggtgtgatattatttcctttgtcaccttgttcttctcttttttttttcctttttccttttgtttcacttgttctctccaatatcttctggaccagcacattcggcgtgagcaatgtgcctcacactttgaatcttcgagatttcccttcgtgtactccctgtttacttcgattcttgtgacttttttaccctttttttctttttctccttcttctaccgtttcgttcatgcttgtttctgcttattcgatgtaatatttttggtgcttttttgctttttatctgcttttgtgtgctggtcacattcgtgtataagttaattgacccttgcccatcactcatacccccttgtattgcattgcccctttgtgttggttccaggtcacatctctagatgttgatttacatgcatcaaatcacaagcataatcttactacactctttcctggtaaacagtattgtactaaaaatagcgaaacgtaaagttagggcagtgatatctgatcccgtgatatctggtctcgtgacctcaggatgtcgcactgatcttatcgctctatcgattatcgataacctcggaaactcacgcaaaggtggggacagcaaaaagtacccccccatcacccgcacccagcaacatccaccaaattcgcgaaaaagagaccttggactccacacctgggcgtatagttgttatgtctgcagcacagccttcagccccagggcttaacgtgattgccctaatctccggtggcaaagactctctctactcgatcctccactgcatccgcaacggccacaaagtggtcgccttagccaacctctacccagaaccgcggaacaaaaccgcaagcgcaagtccaaaccaacgcaaaaatgacgaagaagaagacatcgatagcttcatgtaccaaaccatcggccacagtgtaatccctctctacgaaacagccctccaaatccccctctaccgccaacccatcacaggcggcgcagtcgacacagcccgtatctatggaaccagagccaccaccatggacgagaccgagtctctcgtcccgcttcttcgtcgcataaaacaggctcatccagaagccaacgccgtatctgcaggcgccatcctttctacttatcagcgcacgcgaatcgagagcgtcgctaaccgcctgggtctgattcccattgcttggctgtggatgtatccatctcttccagcccctacggctagaacggccgatgccctggcaatacgccaggcggggctgttggaggatatgtcggccgctaggtgtgatgctcgtattatcaaggtcgcctccggtggcctggacgagggcttcctgtgggagaatgtctctggtgttgggagtggcggccgcatgatgcgaaggtgtcttgtcaaggctatgagtcggtttgcagctgcggaagatatccgtggcgcggtgctgggtgagggcggagagtatgagacgcttgcgctggatgggcctggtttcttgtggaagcagaggatcgaggtcggtagtcgggaggagaaggttggtgatgggggtgttgcgtttgttaggttgaggggggctaggtgtacggctaagagcgcgtgggagattggcgatggcattgcgccgagtgatattaggcggcctggattgttagatgcggtttttgagggcgtgttaggatctgcattggaactttttggctcgcttgacgattcgaaatcgcgggcgatgacgagtactgctcggtcgccagattggcctgtctgcgagcccgtgcatcggttgtctggttctacgtggactatttcgaatattgttgcgcccgaggctggtcccggggcaggacagcagatgaaagcgattgcatacaaggtcgagaaagtgctcaagtcctttgcccaccccaagtccggttcccgatcaacagacgacattgttttcgctacggtgctgctaaattcaatgaccgactttggaccaatgaatgacatctacgtctcgctattcaagaagcccaatccccccgcgcgagtgacagtggcatgtggagaccgtctcccgtctaacgtcaaggtgatggtcacattcgtggtggacctgggtgcaagggaacggcgccaggccctgcatgttcaatccaggtcatactgggcgcccgcaaatattggaccatattcgcaagcgttgtcagttccgttgcagaacgatagcagacttgtgtacattgctggtcagattcctctagatcctggttctatggacctggcgcgagtcgaggggtcaagttcatggattgaaaattaccgtcttcgagctgtactggcccttcagcatctctggagaattggtgaagccatgcaggtaaactggtggctcggtgcggtggccttcttggctcgtggcgaccacgctaatacccaggcgcaagtggcatggcgcctctgggaaagaatgcatgctttacctgacaatgaggacgaggatgatgacgatgggccacagctggacgcgtgggatatcaaatatggccgtcgcacagaggagctgaccgatacccctgtgcccagtctgccccagttcactgctcttgttgagtctcacacatccattccaccattcctggctgttcaagtggatgaactaccacgaggaagcgatattgaatggcaaggtctagggggcctgtgcgagcaggtcaagctggacattaaaggggggacatcttccaccaccatggacagtcaatacaagtataccaatatcgagatcgacgcgggttcgtcggacgatacattgaagcaaatattgagatcagtgaaagaggcttactgtcgagattccagtctgtctcaggctgtgttatataccacatacccagtgcctgaagcttcgtggccagtgcaggttgtgccgtgcagatcagtatgggggcgagaaggacgaaggttgagtgcaggtgtggtcctgcagcagtttagttaggcactatttcacaacgaataaagccactcaatttaacaaaagatcagacaaaataatatttaggggtcaaaagatcgttaaacgtcgatgctctactccaccgatgatcgatgtacgcactgtccgctcgcatgtgataaggcaaaatcccttccgcattcaggaaaagataacagtgtcattctgcctccgccacgttctcaatatctccgccatcgaacttaaacaggactaaattgttagttaccctgctctttttctggacgttatactatcctccccatacattgtacatccttatcccaccgcggcatgacgtactcatcgacataagcatggcgccatgagttcgccgtggaaagaagaacaagaagcgacgtttcgcaccagtacacctctggaccccgaagcgttcgccgaagacctccgactatttaatcgctccccccatccataccacagaagtcgacgcctcggatcatgcactccctccgacggcgaccgtctccacccgctctcctcctactccaggtcctcacgaacaaccagcgacagtggcacagaggcagacgatgaaagcaccggtattctaaggggattacctgccccgcccctccgtcctcgaaaaggcctacggtctggtggggtgggtctcactgaggtcgatgactggctgccaagtctgcaaccgtggccgtcatttgtgcggcctattttgcggacgtcgcggcggagctcggaggaagaacttgaggaagaggcctttgaggagagactgaggttcaggcgccagagacgggtggaggttctccggcggttgttggaggctgcgcttttgttgtctgtgggtggcgtggtcttgtaccaagaccgggcgcgctccttagcttgggaatggagaaagggtatggggaaaactgatattgctaccaaaaatctggggcgcgctaattgatatacagagcttgctgctcatgccctcgtggtcttgggtctctatgccagctatccgctcgctgttcgagcatcgcaaggccgaagctggcgcatctggcgcatctggtccacgaaacggacatacttctcaatacccgcgagcttcgatccggccccccttctctatccgattcttatccccatcttcgtctcgttatcgctgtccaaccatctcccgccacttatcatgcctaatatcatcctcagcctctcctctttaccaacgcctgttataccgttccagaaccgggcgaatggatttgataacctccattggatggtctctatgattcccatcctcgtttccgaacatttctcctcggaccatactgtacccaaaccattgacgcttcgcgggctcgacgcagagtctttaatacttcttttccctttgcatcaagcgttgatacccactttagactttttgttgacgaccagcattcttcccgctgagctgcagcttttgacaactgctttgatcaacttgtacttgtttgcggcctctccccagatggagatactcaaagccttgttatggcttggaggcatgtgtttgtttgcttcttgtcgacatatactgcgttgggaggtttctttggctagaattcccagctggaaattccgccgcgccccacatggcgcgcaatctccccgcaaattcttgaacatgatggaccatcgaatttgtgagaagttgagtagaacggcgcacgttccatcggacgatgctacatcggacagcgatggccctaatggcttcatgttttcaaggccgcgcaagacgaagaccatgcaggataatcgctctttccgcccatcggcagagccgacatctgcagtcgaccaggtcacgacggaggcgattttcgagaagcatgctcgtattgtgcatcgacgacgccataccatatctacattcgacgaagtcgttcgagaggaacgtgtccacaccacccccggtggtagacgcaagaaaatgatgggtcctggcctggcctccttcctctcgctcacttcagcccaggcacaggtccgaaaatggttgtacgcattttacgtgtatgttctgtcgctgattatcattcttgggcctattcgaaaatacgtagcagagcacgcactacaaggccaggatccgttcggttgggctatcggctacctgctgggaaacttctcgaaaattcgcttttgggtgcttatgttgaaccttgaatactggatcgaactgccaccccgccctgatgcagataatctgagtgcctcctgcttccttgggtcggtcgaacatattcgccaggctacttttggagctgccgtgacccgtctactactcagtggatactgcgcgttggtactactgacaggcctggctattgtggttaagctcagctctgttgccgaggttgatacgcgccgcaagattttccacggcatgatggtggttatgttccttcccgcgatttttgtggatccagccttctgcgccatggcgctagccttggtcctctccatattccttctacttgacctattccgcgcatctcaactacctccaatttcgcgaccgcttacctactttctggccccgtatgttgacggccgtgatcaccgtggcccggtcatcatctcgcatatcttcttgctaattggatgttcgatacccctttggctgtcgctttccgatctccctcggactggcctgggcccctgggccggttgggaggtaccgtcacgggatgtaagcatggccagcggagttatctgtgttggcatgggcgacgcggctgcatccctcattggccgacggtacggccggctgaaatggttctggggaggcggcaaatcacttgaaggcagcattgctttcgttgtagctgtcacctgcgggctgatcgcggttcgtgcctggttggtgctcggtggctggcccgtgtctgggctcgaatcggctgcagtgacagctttctccgctcacttctgggcctggactttgctcaaggcggttctggcggcagccggaacgagcgccaccgaagcaatccttaccggttgtaatgacaatgtcgtggtcccagtggtgttatggctgctggtgcggggtcttggcgtctgatgtgccacgttgatgtgtataaatgcgcgacatgtttgcttcctatttcctgacctttttttcatttcttttttttgctcggaggtttgcgtgtgattatttgcctatcatatccctacggcattttgtatagtatggtggggtacttagcccgaggatgtatagattgacctcgactactcaaccagagaccatgtttgggtgcctatactagcggcgcgtcattgcatatctgccttgccttagcttcccccctttctctgaatttaaccaaccgctgcgccatgactgggagccataggctgcagataagcttccgtcaccatacagttccatcgtgttttgtgatcgatcacctacctttcaatttggcagtatttatggagtacaggaagatacgaagattgcagaagacatcctccgtttatagaggagccttgctagagtctagacactatatatagagcccaaccccacagaacgcatacgtatatgtatttcttcaccccctagtctccggtataattccggtatccgtgatctgccttgccgatctcggccttatctaatcgataagcacatgacctagatcactgcgatttggacactcccaaggttcttttttgccgtccctggcgctttaaagagggttgttctcgatattccctataatttggacaactgattcatttcctctatcatttgtctctcatctctcattccccccagacttccctgtaccttttcatcttatcgggcagtccagatcatctccacccctctgaccgccttacgcgatcatcgccgcttgtcactcgttatcgttgggtcacaccccccaatcgtggagtatccctgggtcttggggctctcttcccgtttccaccatcacatcatcttgctctttcattaggacttgtcattttgcccccttagatctttggttctctccatattatactcaaatctcctaacctcccgcccttttggctattctgcatctcacctctcaccgctttaagtgttttggatcaacttgtgtttgcttccttgaagtacatcgttctacatcgacatcatttcttataatctacccgagttcaccggtctcgttccacggcactcagttgcagtaccttcccatacccattctcccggcggttcctcgtccttccaggcttcccggaggcatcgtcatccttttcatagctcccctgatgggcctctcgagtcgatcgttcctattgctgctgctgaggtagttgtggttgctggggtgtaactcgatctgatttcccccagcgttagtctaccagagacagaacaggcattggcgtgcccaccgccgtcatggcgtcccaacattcgaggagatcgcgcgaacccccccgttcagagatgtcgattggtcgctatacacggctcgatgagatcgggcgaggtagtttcgcgacggtctatcaaggtatccatacagtgagtcgtgccttgtcttctaatatgtcaagttgatggatgctaatcggttcccatcacagcaaacgagaacctttgtagcaatcaagtccgtgaacttgtcgaagcttaacaagaagctcaaagaaaacctttcgtccgagatcgatatcctcaaggggctacagcacccacatatcgtggccctgatcgactgccatgaatcaacatctcacattcacttggtcatggaatactgtgcactgggggatctttcgctgttcatcaagcgccgagatactcttggatcacataaatacactcgggatatgattgcaaaatatccaaatgcacccggcgcctcgctcaatgaggtggttactaggcacttcctcaaacagctttcaagcgcactgaaattccttcgtgaccgaaatctcattcatcgagatatcaagccacagaatctcttgttgtgtccctcaccttcgtcgtatcggaccgggactgctcaggtaattccttataaaggcagcgatgactcttacgagcctatgacggggcttgagtccctccccatgctcaaaatcgcagatttcggcttcgctcgatctctaccagccacttcactcgcagagactctttgtggatctccactgtacatggcacccgagattcttcgttatgagaagtatgatgccaaggccgacttgtggtcggtaggtactgtgctctacgaaatggtggtgggtcgacccccgttccgggccacaaatcacgttgagttgctgcgaaagatcgagaaaggagaagaccgaatccgctttcctgaagataacccggcctcagatgacatcaaaaagttaatccgaggtctgctgaaacggaacccagtggagcgattgaacttccctgagttcttcagcaacaatgtgataaatgatccgattcctggcttggtagcggatgaccttccagaaccaccacaatcgccacggccgaggcagcttgccgcaaagactgaagaatctccttataatactgggcctgaggacagacttgcatatcctcccggtccaagacctgttgcaacacgcctaagatcaggaacgccgccgaccgctacacaaatgcgtcgtgtgggaagcgctgaccggcctgctcctggtatttctagggagcaacaattgagagctgcaccagcccaacggcctggacctgtcagccttgccactgccccgggacgccaggagcttaccgaacgcaacgcaactactgcggccgtcgatcggcagagaaaccggaacacttacactgactcttccaaagctagtgactcaacagtccgtgcccaggaggcacgagatcgcgctgcacaagaagtggcatttgagagagactatgttgttgtcgaaaagcgggctgtggaggtcaatgcctttgcagatgaactggctcatagcccacgccttcgaggcggcctttctcgaccaggacaaactggcgccgccggccgtcgggcaacaacgcagggtctacctacagtgtcgccatcttccccgcatgccaatgcggctaaagccatgcaggttgtttcgggtcgttcgcgagcagattccatacatcagcgccagcattcctacgagcgacgttacgggcaaagccctacgtcggcgacctcggcaatctcgaaagcactcaacatggccagcggtcgtctgttcaaaatgggcttctctcctcccctcaccaaaggtgggcgatctccgcctctagcctataaccctttccccgcctatcctcctacacatgccagtcttttgatcaccggagacggctccaaacccaatgcaaccgtagatgaagattgcaaggcagttcaggaaatcgaggaatgtgccacgcgtagtgacgttgtcttcggatttgccgaggtcaaatataaacagcttgtcccgctagcaccttcggcaccgactgatccatctgcgagacctatggacacaaacattgaaccagactctgccgattccgatgatggcctgacagttgatgctattgttacattgtccgaggaagctttggtactatatgtcaaggctttgtctttgcttgcaaagtcaatggacattgctggggcctggtggtcgcgcaagaacagagaagaggcctatggggagttccccgccaaagacagcatgagcgcagctgccggtacccggatcaactacgttgtgcaatgggtgaggagtcggttcaatgaggttatcgaaaaagccgaattcgtgcgcctaaaactcatcgagggtcaacggcgattaccaccagatcatcctagccatccagataaccattccattggctccaccgccggctcgagctcaaccgccgatgtagtagtgagccccggcgtcacagcggagaggctaatgtatgatcgcgcacttgagatgagccgggcggctgccatcaatgaattgactggcgaagatcttgcaaattgtgagatcacatatgttactgcgattcgcatgctcgaagctgtgcttgagagtgacggaacgcgatctattccgggtagcaacgaacggcaaagcggttcgcaacctggtgacaagataattctggacgagctgcaggtggaggatcggcaggttgttgtcaaacgtgagtcttgtgcaagtccatccggcggacatatccaaaactaacaccttattctagtcgtatccagtatgcgtggccgcctcgcatctgtccggaagaagttagctgttctatccaagcgatcctcggcgccgactccaacggggggcaagacacctacatccaccatttctccggttgcatatgccacgggggtgacaccgcctagatgagcactttgttctcccccgagatatccaccaaatctattgggattattacgatattgttcgattcagtagcgtcatgattatagccttatatgtataaggttaactcacgacgctaacaattgaccctatttttcacccgcccttttatatatggtaacctctggctaaccccaatgccatgttcctctttttgccatttatctgccacttacgtttctacgaagactaatttcttcgttcatattcttcgatctatttttccagttcacctcttgccatatatcccacagcacgaaaccaggggagttcttattcatgttatttatgtcatgtcatgccttattgcttttttcttcctttactttttctttacctttcttgtcctcattttcggattggcgtttgacccggggacccacggtatacagattggcactgagtttttttttgggctgggaacgcacaaggtcatggcgttggtgtgctccaatattggatttggtgcagatgctgccagatgtattgtacatagaaattgaggaaactcattacatttttttgtctctatactgcgtaagtaacttgcagctgttataggatatggagcacgagataggtatgtgctctacaggcttggctaaggttggcagatatttacaaacgcaagtaaccctgacgatggcgtgcttgactatgtgtcataagtctcagaatttcttcctattcatttaacaccttgggcctttgcctcttggctttttctaggcacagcatattccctcaaagagatttatatgatctccctgacacatgtttgagcctaaaccattgccgaaatcactgacccgacctccatgtactatgaataatatcttgcatttttgaaataaccaacagaataactgccagaaggaccatgtttaccgtagttttaccacggcccgtcccccaaatgtatggatcctcagcagcccactcaccctggtcaccgcaccaccggtctccgaggcttttctttgcgttttctttcattgcgccatgatggttaagacagacgacatgaatcatgcgctgctatcccatttccaagacaaatgtatgtctaattgggttgccaattttcgtgcaatgtaacgtcggcatcgccaggcaatggtgcgatgcagcccgtagcccgtagccttgcccaaggcttctggaactcttccatgtgggccggattatacggatgaaacccacaaactctgctgggacctttgcctccatctggtgatactccgtacgggtcttccaacttgatttccagggtagtaaaaggcgatgcccagccgcaaggacctatggcatcacatttagtactagcacctcatttttgcgccgttgctagccgtcctcaatttgcctcttggaagcgcagctgaatacaaatactcatcgatcgattccactgtgtgggtagtgacttgatctgcataacctaataatggctgaacgggttgaccctgttgttgaggcttctgataagtcgccagtatttgctacaaagtcggccggagatgacggcctccggcgagcagatggtatttcgggattgtgtatgttcttctctatatcgagtgatggctgcgtgacacctctaatcgttctgcgttcagatgaaggaaatatcttcgaggcaacccccgacagccgtcgtcacattggagtattcagtgctgccctcttaatctttaaccgggttattggtacgggtatctttgccacaccaagcactatccttgcattgactggcagtgttggtctctcattgttcatgtgggttatcggcactgtaattgctctagcagggacggcagtatacctagaatggggtactgcaattccaaggtatgttattgaacgaaagtatcagagagaagacttgactgattaatctggctgtatagaaatggaggcgagaagaactacctcgaatacgtttataccaagcccaagttcctggccactgccatgttcgccgcctatgcagtattactcggatgggctgcaagtaacagcgttgttttcggtcaatatatcctcaacgcagcagaagttgaggttggacgatggaaccagcgtggagttggcatggcctgcctcactgccgcctttcttatccattccgttgccctgaaatggggtattcggcttcagaatgcgcttggtgttatcaagttgattgtcgtcgtgtttatcattgtttctggttgggcggcacttggtggccatacaaaggctgagacgccgcataacttcaaaaatgcgtttgaaggcaccaagggaagtggatatggcattgtcatgtcgttgtacaacgttatctggtcctttattggctattcaaatgccaactatgtaagaacatgaacatatgagttgcgtctagatcacattgctaattacatttacaggccttgagcgagacaaagaacccaacccgtaccttgaagattgcagcccctgttgctatcatatctgttggcattttgtatatgtttgtcaacatcgcctattttgccgctgtatcgaaagaagaaatgctcgggtctggcagcattgtcgccgctgtgttcttcaggaacatgttcggcaaacaggccgaaagagctatgtcggtcttggtggctctctctgcctttggcaatgtgttgtccgtcatcttctcacaagggcgaagtatgtattctcacattcacatttgaacggtatactaatacgacttcgataacagttgtccaagagctcggccgtgaaggtgttttgcccttttccaagatctgggccagcaactggcctttccactcgccagccgctggcttgcttgaacactatatcgtctcggtcattatcatgctcgccccccctcccggtgacgcatacaacttcctcctcaagtatgtgatttctgaagacaccgcaagatcaatactgaccaattctcccagtctcatctcttaccccctttccattgtcaacttcttcgtggccgctggtctcgttcatatctacctcaccaaagagaagaactaccccaactggaagcccggtattcgtgctacactaccagtcaccatcttcttcatgctgtcaaacctgtatctcgcggttgcgccatatgtgcccccaagcgatggccaaaatgtgtacgaacagctaccttactacctgcactgtgtggtagcccttgcgcttttcgcagcaggagcaatctactacgttgtctgggcggtgttgttgcctcggattggtaagtatgtgcttgtcaaggagtccgtcgtggatgcggatggttggtctcgaagtgttttcacacgactaccacaggcagaggcagtgcgttcttagggatactgggtgtgagataaaattgggttgcttgattttggatttatgtgcttgggagatatattttgtcatggtgacttttcaccagaccttactagtaataggtaatagcagaatagaaccattctttcttcacaacacctcattaccaactgctctgtcatgctgtgacatcagaacaatgaaccgcggtgctgtatgttccagtcttctatggtagcccacccaagagaatcaattgaaactgtcatgagcccctcaaacttgctggtatattgtcttgcaaaataacagcataaaagccatttccaatcagttgtctgtcatatagaaatgagacatccactgggtgaatttgcgtgatgaaggaaagaaaagaagaagaagaaaaaaaagaacaaaaagcacaagatccactggcattgaccgccttcgcatctgccggactctgatctcatgtttttctttctttttggtgacggttggtctcaagtccgtggttcaattgatctcacatttggttctatttaattatttaatactaataccctttactcttctctttctttcctttttctcccggtattcgggttcgtggagctgatgcgccgcttctccacgcgtgtgctgctgcagcaagcaaagccaccgcttctttccgccagatctcccctccccctctttgtttccgctcgttctcctcaagcttcgattcctagatcaatcacccaacgccgctctccttcgccgctatcacagaccgccaaacgatactgttcctaccgcagaatgtgtagctcacgccgcgagacctccgggtcaaccaacgtcaagggcggccgtgaggtcctacctacaaacgtcaagccccagcattatgatttaacactagagcccgactttgagaagttcacatacgagggagcagtcactatcgagtacgtcatttatgtataatgcatactgtggtgcatagttttatatgttactaacatctacatctagcctggatgtgaccgaagacaccgatttcatcaccctcaattccaaccagatcgaaattcatagcgcaattgtctcatccaagggctcagtcgtagactccaagcccgaaatttccttcaacgaggatgaccagaccgcaaccatcaagttcggccaggctatcgctgcggggtcggatgcccagttgaagctcaccttcactggtatcctcaatgataacatggccggattctatcgatcatcatacaaggagaatggcgagactaagtacattgcatcatctcagatggagcccacggatgcccgtcgggccttcccttgtttcgacgagcctgccctcaaagccaagttcactgtgaccttggtcgcagataagagcctaacctgtttgagcaatatggatgttgatactgagaccgaggtccagggtggtgcgaagaaggctgtgaaattcaccacttcgcccctcatgtctacctatctcgttgcttttattgtcggaaagctcaaccacattgagacaaagaacttccgcgtccccatccgtgtttacgccacccccgaccaggatattgagcacggccgtttctcgttggagctggctgccaagactctagccttctacgagaaggcatttgacagtgattttcctctgccaaagatggacatggtcgccgtgcctgatttcagcgcgggagccatggagaactggggtctgatcacataccgtattgttgatgtattgctggacgagaagaacagtggcgcctctcgaaaggagcgcatcgctgagaccgtccagcacgagttggcccaccagtggtttggaaacttggtcaccatggacttctgggatggactgtggctcaacgagggttttgctacctggatgtcatggtactcttgcaacgccttctacccagagtggaaggtttggcagacttacgttatcgacaacttgcaaagtgctctttcgcttgactcgttgcgcagcagccaccccattgaggtgcctgtcaagcgtgccgatgagatcaaccagatattcgatgctatctcctactctaagggttccgctgtcctgcgcatgatctccaagtacctgggcgaagatgtcttcctccaaggtgtccgcaactacatcaagaagcacgcctacggtaacacggagaccggtgatctgtggtctgctcttgctgatgctagcggaaaacccgtgcagtcggtcatggatatctggaccaagaatgttggcttccctgtcctcagtgttacagaaaacaaggaaacttcttctattcacgtgaagcaaaaccgtttcctgcgtaccggtgacgttcgtccagaggaagatcagaccctcttccctgtcatgcttggtctgcgtacggacaagggtattgatgaagacactatgctgactgagcgcgagcgtgacttccccgttcctgacctggacttcttcaagctcaacgctgatcactctgccatcttccgcacatcatacagccccgagcgtcttaagaagctcggccaggctgctcgtgacggccgtctgagtgtcgaggaccgtgccggcatgattgccgactcgggtgccctggcagcttctggtttccagcgtacctctggtatgctttccttgctccagggcctcgatactgagtctgagtttgtcgtttggaacgagatcttgacccgtatcggcaccctgcgtgctgcttggctattcgaggacgataagacaaaggacgccctcaaggccttccagcgctcgctggttgcccccaaggcccacgaaatcggctgggagttccccgagaacgacgatcacattttgcaacagttcaaagcgctcatgttcggctctgccggtatggctgaggacccgactgtggtcaaggccgccttggacatgttcacccgcttcgctgctggcgacctctccgccatccaccccaacatccgtggtagtgttttcaccattgcgctgaagcacggtggtctcaaggagtacgaagtggtcctagatcggtctcgccatgcccagacttcggacgagaaggtcaccgccctgcgctgcctaggtgcctccgaagaccccgagcttatccaacgtactcttggccttgccatgagcgaggaggtcaagagccaggatatttatatgcctcttggcggtctccgcagccatccggctggtgtcgatagccgctggaactggctcaagtctaactgggatgagatctacaagcgtcttcctcccggtctcggcatgctgggcactgttgtccagctgaccactgccagtttctgcaccgaggcgcagttgaaggacgttgaacagttcttcgcctctaaggacactaaggtaagtgacttcaccaaggtttcacctgggttttctatccttgtaatatttactaatttgaatttttcttgcagggcttcgaccgcgctgttgagcagagcctcgactctatccgcgccaagattaactggctcaagcgtgaccgcgacgatgttgagcagtggctaagcagcaacagctatctccagagcaagctgtaagtctataaaaaagtggctgaacaatgttcataaatattttggatacacggggattctttgttttccagcgttagcagctcgaacttgccttctactgcacattatctctacgttgtcacctacggaaagcacgcgggatgtgcttctttgagctaaaatcatactccactcaattatttcatatcttgtagagtaagtgcttgtatggactacggctagctaggcaagccttgattggaatgactaactgcatggtatttggcaaccggcgccactagttagtgatgacatagaagcctccgagatcatgttgattgctaacaaaacaccccatagcgggggaaaaaacaggtggtatcgatggaaaataatacagaaaaaagagagaaatggcagagaggcctacgcccaccctccctttcctccgaacccagaactgtcctcgatcttcttcccgccaggaccgcgtgagggcttggactgcgccgcttcgtgcttgcgcagttcctcggggacacgcgatatgggtgacttgatcagcatttgtttgagatcgtacctgcataagcattagtaaatcaagaccgcaaccagatgttaaacggagaggaacgggtgtaacatacatgacatcgctatcctcgctgcccaggaaggtgatagcaacaccactctttccagcacgaccagtacgaccgacacgatgagtgtagctttcgatcgaagtcgccatgttgaagttaacgaccagtgacacatccgggacatcgatacctcttcctgcgaggtcagttgcgacgagaacgtctgttgagccgttgcgcacggaagcgagcgcggcttcacgctggtcttgggttttggaaccgtgtaaagtaaccgaggagaaaccccattgtttgatttcgcgagcgatagcgtcacagtttcgcttgatgttgacgaacacgataatcggtggacggaactcgcctgatgagaggatttcgccgaggcgcttcttgcgtttgtcttcgccggagatcatctccacacgctgctcaactgtgtcgacggcttcaccaacgccaccgatggtgataatggctggtcggcggaggtacttacgagcaatgcgctcgactgcggcaggcatagtggctgtgtacatcatggtctggcggtactggtgttggctcattgcagctgaattctcagcttcctctgtatcaggcttttcgttcgtgacggggagggcatccaggatcttgttgacaggctcttcgaacccaagatcgatcatacgatctgcttcatccataatcacgtagcagcactgactgaggactagcatgcgacgctcgatacagtcaactagacgaccaggagtggcaatgataatttcggcgccatcgcgcaggctgaatgcttgctcttcaagcgagtgaccaccgacaatactgaccacgttgaaaccaaggggttgtgtaaacttcttggcttcgatctcgatctgctgcgccaattcacgtgtgggtgctagaacaatagcgtatggaccgtcgtttttgcgccactcattctcgtcaagacgcggtagcgccgagatgtagactaaaagtgggaggaggaatgcagcggttttaccggaacctgtcacggccacaccaatcaggtcacgcgactgcatggcgatggggattgccgcgcgctgaatggctgttgggtccttatatccgacacggtcaataagctccaacaagcgctttggcaatggactctcttcccacgaacgcatgggattgggtacgctgccgcctttggtggcaatgttgaaatcctccttgaaaatacgccagtctcgctcacgcatgaggtccaagcgcttctcactccaatgcttgtcaatctgcgtgcgggtactatcctcgcgtcgccggcgttccatctccagcatttgtttggctcgcgcgctaccagcttcgtgatcgcggctcaccagtgcctctgcgtatttgcgcgcaacctcatcggcgacatcgtcaccaaagcctgccaaacgccctcggccaaagaagttggcttcctgtcggcgctggtatagggggttatagtctccgcttgtgtcttcctcggtgttccattcaaagttgaactttcggtctgcagtacgcttgcgcttcttctttgccgagaagttagatgtctggtcggctcccatgtatcggtgcttagtcaatgtagctagtgctgccgcttcgtcttcttccgtcagacgcttttcgcctttagtcttagatgggggtggcggcatatcctggtcgcgattgtgttgattgtgctgacggcctccctttcgcataccaccaggtccagttggatgttcgtcacgcatcgctcgcggcccggtggggacatgacggaccactggttcatcccgcacattgcgaggctcttggcgcctcacagacgatggtgcagatatgagaccgttgcgatcagcgccgttggtgcgagccttggcttgccgctctgcctcaacctcttgagcccgtttctccagagcgattttctctcgttgagctttagacaagaatttaggctacaagaagatgtaaatgtgagtaaaaggcacggaatcttgcgtcatgtatcatcatcggaagaggacaggcttacttttgcagttgccgcatctgcttctttcttcttgcgtatcaagtcctccacactcagtggagtgacagccggtttctttgcgccccatcctagcttttgcttcttctgggtatcagctggaggcgggggtggcacatcatcgggaggaggtggaggagcgatgctgtctggcggcggtggaggagcggttaaatcttctggaggaggcggaggcgggctgggcaggcgctccactgagggagggcgtggagggaatccctcggcgccgttggtcatgacttgaatatgcaagagaagtgatggctaaggaaactagagacggaatttctatggaatacgataagagctagacgcgtagtcacgtgtgcatgatcacgtgcatatctactatagactccgatagagtacggagtaggtaagatggctatattctttctacgccgccagcctatataccccgagtagggcgcacgtgtgatgcgcgttatagtatatgacattctctactggcagaagtaaagcgtgtctggggccttgggatgcaaatcccactgaaatatgactctacggagtacggagtacggagtacgtggtgcagtgcagagaaaagcaggagcctagttgtcaagtaaagttctagagagagagagcctagtcagatcatcaccccaaaaatgagaagcaagttgtgagatgtttgtgcactaggagattgtatactatggtgaaccgtcctggatggttggtatttttgtgtcgttctcgtcttacctgcataaccaggctgcccatcgtgcatttccctcttcaatggctacattattagaaaggggtagaaaggattatacatgctcaaccacaatatactggaacgatctagttgttgtgcgtaagtctaacaaggctaagacaatcgtagacgaatcaattgaaaacagtttaaatgaatttcattggaaaacaagccaccttagaatacaattggtcccgaaggatccaaatctcagatcggcaaatcttatgtcaagccccaagaagggacaagacaccagtgcatctaacgaaagtgagaagaagctgtctttaagcgggggcaatatcgctagagaacaggagggaggaaaagttgcccagcacgggcaacggggatgatactacatgaaaaaagaactcacccacccaggtcaatatgccagggtaagaaacgaagataaaacaccgaaaaggcaccagcagaacttccataaacgcacccattcgtgaagaaacgtatccatagttgcagtcattggcttgagggacgtgcatatgactgttgggtttcaagcggcaccgccgttcgctgctgtctgttggtagtaggcatacgcctgtgcagccgcggcatcaggtgtgggctgcatctgaggaatcgaagcaaactgtccctctgcaggggtggggtgcaccgccacattcccgccagtccgaacagaagccacggatgaaggaccgtagatttctcgatccagggccaggtattccttcgcggcatccttggtgcctctttcgagaaggtaattcatgtaaatttgcacaagttccttgacagagtcgacttgcagaacgctcttggaccggatgtcggcaatgacctgcttgatacgttcatactgaaccgactcggtagccgcgctggtgggttgctcaatctcgaagacgagatagcttccccaaaagggtcggctgtcgaggtagtattgctgattctcgtggaaaacattgcgcgcctcgtcaggactgcccttgatcttccacaaaagccgggcccattcggcaacgagagcagcctttgtagccatttcacactctggcgaatccaattgtgtcttgtagacttcaatggccgcctcaagacctccgtggcgacgacacagatttgcgagtgagataatcgtctcaacatggctggggagatacataagaatagcgttgtggatatctttcgccacgtccacgcggtctgacacctcttcgaagtaggcatagtggagtcgaatcgtgggattggcaattgggacgtagagatacgcggcacgctgatatatgattcgaacctcttcctccttgtcaggctgagcagccatccagcgagcgtatcggaaccagaactcgtcgtaataggcacaagtgaccaggcaccgctcatacaggaattgagttcgggagtacaaaccctcgccttcctcaaagtcaagatacttcttccagttcgtcagctgagcttgatcgagctcagtgacatggaaatagggacgcttaatttccgattcgaaagtccaacgcctggtcgtctcagcctgagtgtgcgcgaaaacctccaggtggtaattgttcacgcgcgctgtaagagctttcgtcatctcttcttcagtacaggggccagcagcttcgatctcagcgcggaaagcggcgatggtctctgccgaggcgcgctcggccaaagggctaccctgcgcgatttgacggtaccgctcaaagtagcgagaatattggtgcataggaatatgaatgacacgtgcaagaattgcgaaaatcttatcgtgggcctcaagccgctcctcgaactcaatgtacttatcccagaagggatgggacaggaaatcaagaccgacactgctcgcacctcgttcgaaaagcctagttgatattaggttagcatgatgtggacacatgtgcctgatgggtgggaaaggagtgataggagtgatagaggtgataggagacaggggaaacatgagcagtgaactctgtccgtttgaaaacccaagtaatcaaatgagtgcggtagatgaagctaagggataggtgggcatcctgtgctccgtaaagggccatcgaacgagactattcattgccattcaatgcaaggtcgtaatttggtcaatcagaggagatatgcagcctgggtgagctatgggtgagaagtaaactccacttagatcaaagaagcaaagcagcgagtggtttctcacccatcgacaatgagaccgactggatattcagatatccagaaaaaaatatgtgaccggcatcacgagaactttcgcgagctgcgtcggtaacggttatagggaaagggaagaagaccatctctactctcacttactctcgaattatatcggggtcgtgcgaagtttccgccttgaacgaacagtagttcgtccagagatcaacagagggcgagatactagcaatgcctcgttcataaacctagggcgacaggattagtacaaagccatggaaaagaagaggctggcgcccagggagggtgtatgcataccatctcagcggcctcagtgccggtgagagagaactcttggtcggcatacttcttccagtatccaaagagcaatgggaacttggcaaggaaccggtcgtaggctgcgcgaacggttgtgatggcctgggggctggaattgcgcgttattccaccctcgagggcctccgcggcgcgaatcagtttttcccaagtttcgaagttgtcaggatcatcaagctgtaaaagatagacatgtcagtcgacaaggaacatgttcgtcaaatgccacatggaacacgtaccagctgggtctcgagatttctaatctccgcattctcctcttcggagcctccgtactgatagtcggccatggtcgtccagtgctgaggatgcgcgcgagaagttgatacctcggtataagacaatatggatggatgagcttgcaggtactaataagatagcagtgatggtaacaatgaagattgcgaaaggaagaaattcttggggttgagacgagacagacaagcgatagcaggtcctgatttatgcctgaggcgaaatatctttggcccgtcctggtccagggatttgagggcggtatagtccatggcgatgtggcagaaatacccgtcgacgccttcgggataaggcgcaaagaccactttatgccttgtcgcctgacaagcttggcgtgagcccgggcggtatcaactttttgaccggaacattcacaagcaacctagaaccacccgtgcacactaggatcacaaaccatcttgatccactatgtcggtttcgaagcagacgggcacattgttggaaaaccttcctcaacgcctggtaaatttcttcgctcggtatcctccacaaacccactccgcagctgtccgccgtcctgcccctgcgaacggagagggctatgtaccaatgaaggtagaatccccttacacaccagatcgcgatgccaagggtgcaccaggagagaaaaagcatggctggactccttcacgagcactcctcgtgaccagcaacgatgtccggaatccatttcttccacacaagcgattcggcaaatgggaagcaccgaaatatggactgcgccagcaagccgatctgatgaagctggccatcaagtacaatgtgggggcacttcttcctcctagtcgcaaatcacctgaattcaaggagacacgacgtgcagagcgtggtttgcaggtcaagggaactggtgttggccataaggtcaagggtcacaagtgggagcgcaccatggagtcacgtctcgaggatcgtcgcaaggcgatggaggcaatgccggagatggtcaggatgtggaagcaggttagttctctattggtccttcctgaagtggttagagcaatgctgactcggcgcaacagagaggtcatggccgcggctggagacaatggcccaagcggtaatgtggatgccccaccgccatccaccgtcgcatcgtcttctttcccttctttattttggccagtttgttcattctggcttttcaatgctctgtcgattccaacgcgaaccggatcggcacaaatacttgtaccagccatagcaggagcttgggacggagttttgtctttgaagtatactatcaaccccatctgtacaatacaatctacggtcacatcgcccaatggtacccaagaaaatcatttacatgaatccggccggtgttatctttcatcatcctcaacaccaataagaaaactcctagctgaatagtcatgttcagcttgcgagcacaagcagcagaacgggatgaaccccaagaacaaatagtcaataatagtatactatagtgcaccctacgaaggtcaccatgatgctgatcagttcagccccagttcagccttagaaacaagttagaacactacagtggcgctgttacagctttttcagcttttctttcacaattacaagattgatggtctactccgtacagcgttagcacttgactcacacgtactgacatagattgtttagtgtcattcgctcaacccatggctacgtgtttccagcccaatgtatcatcagtgaaattaggcacactgttcgtatataaatagtaataaacttgagtgggtaagctggcattgtgatgagactaaatgtagtgctttagctttagtaggatcctagacacccatgcaggttgggttgcaaatcgtgcatctaggacgctattggaacctgtgaggtataagttataatgatcaaataagttctcacaggcataggcaaatggttggttggaagtctatagcgatcaataatgtgattgtgtatcataatgtgggggcgtctaatcattagttccaatagtacatactcatgaacgtgtcggctgattcaaacatgtctccccgatgaggatgtccgtgactgtaaagggtctagtgaccctgatattatgcatagagtgcatgagcatcacaatgtagttagtggagtcgctgtagatcatcgtgtatatagtgtagaatagtgcgtgtggtatagtgacaacaatggccggcacgataaggcgctatgacaaagcaactattgccacgtccaatatatcacgggctacgtgcgaggggaatctcatctcgagcattcttcgtcacttcacatcacgccttgaaaacttgaaaacaacttataaaagccatatacctgactcttggaatgtccttattttctaaacctccgatagcctatctctttatagtggactggagatcatacccaggctagttgatttgttggtatcggtaacctccgatgagaatatagctactgctatcttatatgtggtaaggtctccccacctccttcttcaaatccatttgatattactcatttacacaactatgcgatctatttctggatcttccagatatccattatgctgattgtgctgattgtactgctagacaggaagtcccttctttcacaatttgccaccttgatttcaaacaaagtacgaagtacaacagacgttgaagtgcgtctgtccaaagttgaacttcaacaatggtggaatcaacctttcaggggtctatccattcaaactatagtcaagggtactccgccgatgtggacatcattcgagaccaggagtatcctttacttaatggtataagtgtccgtctgctatcactctattcatgctgaccactgttctactaggaacaacatacctagattatgctgggacaacaccctacgccaagtccatgatcgagtctttctcgcgtgatcttacatctaatctttttggaaaccctcattcgatgtctttgtcgtcgcagctttctacacaaagaacagaagacatccgagtccgcgtattgcgtttcttcaatgcggacccggatgagttcgaccttgtctttgtggcaaacgcaactgctggcatcaagctagttgcagactcactccgggactccgaccatcgaggattttggtatggctaccacatcgatgctcataccagtctcattggggtacgagagttggccgagatgggctaccagtgtttccaaaatgatgacgagatggaggctgagatttcaaagctggctggtaaccagtccaaggcgcccagactccttgcctacccagcccaatccaatatgaacggccggcgtctgcctattcgatggtgcgagcaagtccgagccgcggcaaacgaaagtggagggaatgtatacaccctgcttgacgctgcgtcgctggtatccaccgctccacttgatctgggtccgtcttcatctgccccagacttcactgtcctcagcttttacaaaatctttgggtttcccgatttgggtgctttgattgtccgcaaaagtgctgcgcgggtctttgagcgacggaagttttttggcggaggcaccgtcgacatggtcctggccactggcgtgcaatggcatgcgaaaaaagaaacatctattcatgagcggctagaggatggtactcttccgtttcacaatatcatagctctggacacagccttagatacgcacgaacgcttattcggctcgatggcgaacatttcggcacatactgggttcctcgcaaaacaagtctatgataggctttcttcattggcacatttcaatgagaaaaaagtctgccaaatttatcaatcgcacacctcggcatatggcaacccgcatacccaaggtccgattattgcattcaatctttgcaatagtcgcggtgaatgggttcctaaaaccgaggtggaaaaattggctacggtgcaagatctgcagatacgcactgggtccgtttgtaatcctgggggaactgcctcgtcacttgggtggactggaccggagcttcgccggcattactctgcgggattacgttgtggtgataaccatgatgttcttggagggcgaccaacaggaattttgcgtgtcagtatcggtgccacgacaaatatgaaggatatagactccttgatcaacttcatagaggagttctatgtggagaagattccacccatagtcgccctggatcctctggccgaagacgatggggtcgttgctcctcatttttatgttgaaagcttagcagtattcccaatcaagagttgcggtgctttcaagatacccgaggggaaacgttgggaagtgaagaaagagggcctagcttgggatagagaatggtgtttgattcatcaagggactggtgcagccctgagtcagaaaaggtatgcgtatccaagcaaaagcatccaaatttataaactaatgatagtagatttcctcgcatgtgtcttctacgaccctcaattgatattgaaagaggagttctccgtattacttgtggtgcagtcgcggcgtcagatcaggtcagccttgagatttcacttggctgggaggacacaagtctcatctccacatccttctgtccgagctcgaccaaaaaatccacaatagtctgcggcgaccgagtttctctccatgcctacacatccccggtggtctcggcattcttctcagacttcctgggcgtgccctgtactctcgcaagattccctacaaagaccaccaaccgctattcacagatgcaacggacgcctaatacatggaagaaccgtttccgcaagctgatcatgccaggctcattcccacctgacttccctcctccggtacttgagggtggtcagagactaatcacgttatccaacgagtcgccaattctaattgtctcgcgttcatctgtcaaccgactgaatgagatcatcaaagcaaacgccaagaatggcaacaataagactgttgccgcggacgtcttccggggtaacattgtcgttgctgaacgacttgctcgccgtggggacgtggaacaaccatatgcggaggaccggtggtcatctcttcgaattggaccagatcaacttcggttcgatgctctcgatgcatgcgagcgttgtcaaatgatttgtatagatcagttcaccggtgtccgacgcgctgagccgttttcaacgcttgccaagacgcgaaacatcgatgggaaggtcaaatttggcagatattccgcactttctccagaagaactagagggctttgactcggaactaccagatcgcaggacggtgatggtaggggatgtcgttgtgcccttatatcaggatgactgagtattcgaatgctcgttttcggcattatgtgatttcggctcgtatttctttttggacttgggtgtttgatatgccattatataataatatgtaccttgtatacagctgtacgtatctcttcgcttattattttcgggaggtttgtcaatatatagaagtcttggcttcttaatctggtattcaacagttgcctagtaaacattttgaatttgatgaacgccatagtgatacccatgatagtacctaaacaaccacagtcgcagtagccttttctggggctttggtgaaaggcgccgcaaagccataggtctggtaacctttggaataatccttgccggcctcacgctctagaagatatatatcagcaactcggcccttaaacatttgacattccaaagaaaactcaccatgctcaggcgggaacatctccatgcgatgcttgtagtattgctcccgaagatcctccccgtcactcctcgagtgaaaggtagcataaaggctcgatcgactcttatcggtcttgttctcagcagagcgatgggcgagatgcgacccaaagatcagcatatcacccatttcaagtggaataggagtccatgggtgcgagtgctcccattcaggcttgattcgaccacctgccgcaaattcaatttgcattttgtgggacccgggcacaacctccagacatccgttttcaggcgtcgcagcgtcaatggctatgttggcggtgacatgttcaatgcgaccgatgtggtcgtaggctggtgcatcgaggtgcgcctggaagccgtttccctgtggctgcttgtagttgatcttctccttgaagagcaacatatcctacagttaatagcttgatgttagtatgatctcctgatagagcttcggtcttgtggaaatgaacatacatcgcctgagactgccttcagaatctccgccagctgctcgccgcagactagtgacttgaactgagggtggtattcaatgaacctttccgtgcgcatcagctggcgttcgcccttgatgttgatttcatcgtaaggcatccatttgcccttgacacgaggccaggcctggatttcttgagtccatcgcttgagttccgtaggatcaacgagtttatgctcgtcggcgcgtaggaggaggtaaccattctcatggtaaaaagctatttgttcaggtgtaagaggcgacatctttgagtaatttgttcgaaaccaccgaagtaggcagataatgagatgatcgaagtgagaatgcagtaaacctacgagcttttaatagtttttcgaaacgcatcgacttctgttgttcaacagcggggccattccgataattcggccttcgattgccctaggaattgacccgtgggccatttctcaattagttctagattgcgttggatgcgacttcagtgaaggtgttcgtcccgatgccaaccagaaacccatgggatgccgcacagaccaacgggcttcgtgccgagacgaatgcgattcgctcatccacgaatctttgagaatatcgtgagttattggaggggcaagtgagaagatcaccatgtgcacgtgctgagacggacttcgtgcctttattcgcgatttagcccaatgctacaaggacttctaatatgtcaccacaccctatgtacgaccaagggatctatttaagaccatcaacagaccatttcttgaggaataaccaaaagctttcatcaaaatgaacatgaaaatgactatttccaagaccgagcaacctctcaactcggtcgaggaacacactcgagcaacgatcaaaacattgttccaatttctgcatgcacagggccagggtgactacctcggcgagcaagtaactcaactggaacactcgctacagtgtgcatatcttgccacccattccccggagcatggaaacgaccctgaggtcatcgtggctgcacttttgcacgatgtcgggcgattcatccccgcggccgagaagatggagaaaatgatcactcccgacggccagtatctcggaagacaaagccatgaagctctgggggagttctacctgcgccagattggtttcagtgagaaggtgtgcaagctggttggtgcgcatgtaatggctaagcgctatttggtcgcgacggatcaatgctattatgatgcattgagtgagaccagtaagcggacattgaagttccaggtaggtcacctttcccttattacattctcaattttaggagtatactaatgacaattagggtggcgggtacaataacgagcagatccaggaggcgcaaaaggatcctctgcttgaggcaaagctttccgtcagacgatgggatgatctcgcgaaaaagccgaattggaaagtccctgatctggaagcctatgaggaaattgcctatcagtgtcttattggtgagtgtgattgcgatagcgacctctaacaacccaatatatatactaaacatatacagactcccggtcaaagttcaccctacattcgaaagaatatcacctgccaacacagcccacagtggtgatctgtgttgatggcttcgatccggaatacttgaagtctggtattgagagaggccttctgccgactttcaagaaattccttgacaacgggttccatgccactgctaagagttgcatgccctcattcaccaacccgaacaatgtatccatcattacaggcgtgccaccctccatacatggaattgccggaaacttcttcttggaccgagaaacaggcgagaccaagatggtcaccgacgactccctacttcgtggctcaacaatactggagcagatgttccggcgtggtgtacgagtgtcagccatcaccgccaaagacaaactgcgcaaaatccttgcccacggcttaaagggagccatttgcttttcttcggaaaaggcagcggattgcactctggacgagaacgggatttccgatgtggaaaagtggctcggtcagcctgcgcctagccaatattcgggggatttgtctttgtttgtgcttgacgcaggcatcaaattgctgcaggagaagagatcggacattttgtacttgacattgtccgattacatccagcacaagtatgaacctggcagcaaggaggctgacaatttcatgggagcaattgacgagcgtttgcagagtcttgcagctctagctcctgtcatcggtgtaactggtgaccatggtatgagccaaaagtcaaatgagctgggagagcccaacgttctcttcctggaggaagttctcaatgccgagtttgggccgaatgcctctagggttatctgccccatcacggatccattcgttcgacaccatggtgcactcgggtcctttgtgcgcgtctatctcaaagacatcacgcaactcggatcgatgatttcattctgcgagtcactcccagatgtcgaggttgctctcagcggcgaagatgccgccccaagatatgatatgcctttggaccgggagggtgatattgtggttatttccaaaccgcatgccgtaattggcagctgcaaagcgaatcatgatctctcaaacttgaaagaccacccgttacggtcgcatggaggcctaagcgagcaagagatcccattgattatgtcaaagccggcaaacaatgggagcaaggctaaggcgaaggactggagaaactatgacgtttttgatcttgtgctcaactgggcaatctgatatttatctatctcgatgcccgagatcaaagaggaggttccatcgatgtattataatgtagccaccaatcgtcaatatcagggaagatagtttgaaaatcaaagcttgccatgttttccatccaaattgcatcaaagactgggggttgttcctgggcaggagacgtacgatacattgtttcgtgggctgtgtgagcggacatttggcatctactcgacaaacgttccaagccctcgctgatgaccacaaggagatggtgtttatgcatagactgagtgatatcccgaagggcagccacggtgtcagtgaccagtgaaaggatcttggtcgtatcaattctgaccatgaaggcatacttcgtagcaaccttgaggagaaagacaacggcgaaggcgagcatagtatcgaaatataaaggaagcccattcatgaatgatcgaaattcggcatcagaaacaatcatccgaagaattgacatagctgacaatacgccggaattggcgatctcctccaattcaggtgacatgtattgaggtgagctctctgatatcggtacgccacgaaaggcgtgtgagcaaaggtatagctttgcaaaatgatagtgaaaacccacgcccttttgcggatagttgccgacattctgatttgctttgaagctttcgctccaatctgcaaaccaggtatccagagagatagaacatcgacgcagttggggcagggtctgcggtgcaataggggtatcaacatccaccccgaaggtgtcgaagactcgacccaggattgaccattccttgacctggctgattagtctagcatcatcttctgtggcgtgtgcagtttctagtattcgactagccgactcaattataaacccttctctggacatcggaggtcgaccgtaggcgatcgaaaagtggtggtcgcatacatagacgagatagtatagtcgagcttgaagatagccatcgcggtctcctttgagggctttgtagataccactatgaagattaatgtccgatgcaatgcggacggctagttccattagctttaatccaccacaagattgcagccacatcacataccattcccgatcaaagcccaagaaagttcatgcaaccaaaacgcaccaacgcacaggccacggatgtcatcttcattcatatgccttgagaaagtttgggccgcgacaacgttcttgtattcaccgtagcaagtttcaaagagatgaccgagggaatgcgaatgcaaagcagccacggtacaaacagccgccgtcaatagtggggatgcgattcgaaccgagtccaaactaatatggtcgccaagaatacgatagagaaaatgatcaagtctgagatgatatgtttcgaacaacgaaacggcatcgcgtagtgaaataagtcccgtagatatcaagtctggacgacgggaagttgatggattgtttggtagacctgcctttccactttctgagacgcaggaggctgggatggaagctgggccacctcggggatccattatcacttcccatgtctgcggtggctcatggtgctcatttggctgagacggttgacttgaggtggagatttcccccgcgataactttctcattgatagtctcaaccggtgggctcaaagaattatcttgtatttcgggcgcagcttgcacagtttgcaaagcttgaaactcgggcatgtcaactttggcagcaatctttgcaacagcctcttctagccgccgcatcttttgcaccacggcccctttccatctagatactgtcaggaaatgccaatgcaaacgattagtctgtacttacgtgacatcgtcttctagtaatgtctgcaagcttcggttcacgctgcaagggagacctctcttcttgcaccgcgagcatggcatctgaccctcccccatatgacatttgacctttccctgtcagttacttgctttgtcatctacttcaagaggaccaaccttttgttttcgacatgctacacaagcagtaatcttgcgagtaatatcggggggctttcgatcgccgaatgattctcgcaaagcacttacgggcggcggagacggtagttcgatgtccataatgagtgcctgaattgaggttgccgcggagtgataatgttctcgactttgcagtgtttgcatcagatccgataaattcttacaaagcaccaaccagagttcagacaattcagcatgacctttccgcgtccgaataatgttgcgcacttcgcaccgaagatatacttacgggggaaacgggggaccagctggcgggataaggccggatccacgtggggtcgatgggaaatcctgactggcctcaccgcacggtctattttagctgtgtatcccccgtggcagcttgcacgttgctcattgcatcttgcgcttattcatgacgactgctatggccgataggaagtatatcgcagaaaagctaccggtggttctctccgagatgctaatgtcttggctatacctcctattatacgtgatgtgaaagaagtatataacatcaccattcgccaaattaacaatgtgtgcaacgcaagggaatcgcattttgtttcctcgatcacttctactctccttaacctcaagaatcatttgattcgttccaatggcatcgttcggagccaaattgaggtttgtagccactgcaggcgttggattcttcgcagatggctatcttaacctgacaattggacttggtgagtggcttcaattaatcaatgaggccgaagactaatgttacacagtggtcccaattctgggttacctatacttccaagatgacaaggtaccgtcagtcgacagcgacatcatgaaaggtggtctgagcctgggaatggtggttggccagcttctttttggaattctgagtgatgtttgtggtcgccacaccgtttacggcaaagaactcctcctcaccatatttggaaccctattggtagtcttgttgccttggaacgggatgtcggcccagtctgtgacggcatgggttgcaatttttcgtgtcgtgaccggagttggaattggtgctggtaagtctttttcctttggaatagaagcatggatctaactcgagaaagattatccattgtcttcatctttggcggcagaaaaatcaccgtttggctcccgtgctattcaagtgttgactgtcttttcgaatatcggcctcggcaatatttcagccagcattgtgtttctgatcttgctcaaggcattcaaaggggcgatagccaacaacataagccatctcgaatgggtctggcgtttgctattgggcattggaattgtgccagcgttgttcactctttatgcccggctaacgatcacggagacaacaccttacaagcaatgtgagagtgcctcggtcttgtgctttgaagatagctaatactgtttagatgtctgcgatgacgctgccgggcagaaacgcacattcaagaagcagtgggaagaatttcgcgagtacttcagtcactggcaacatgccaaagtgctgttcgcaacatcagcctcctggttcttgtagtaagttaggtggacttggaaaaaggaaaagccgcaaactaacgcacacagcgacatcgcatactacggtatcaatctcaaccagagcattatcctgacaagaatcggttatgccaagggagcaacaccatggatcaccctgtaccacaccgctgtgggcaatataatcatccaggtagcagggtatctccccggattctacgtcggaatattccttcctgattgcatcggtcgtgtgcgccaacaattctggaccagtatcatggtgtgtatactttatgccatatgggctggaatcagcacacagagcgcaaacaccccgacagctggcttgatggttatctttgccctctcgcagtttttaatgacggttggtcccaactgcacgacgttcctgcttcccgccgaagtgttcccaacacgtgttcgaggcacagcacacggcatatctgctgcttctggaaaatgcggtgcaattctaactgcatttgctttcggcactgttgaagatgcaatcggcttggagggcgtccttggtttgttctcggggatcatgctgctcactgctcttgtaaccttgctgatacccgagaccaagaatcatactcttgagggcattgagaacaatgggctctatagaacaagcggagctgtcaccgaccttccaaattctagttgtattacctatgtcaacgttgaagctgggaacggggaggcaaagaccagctttggagatgatcaagttaagaagttagctgtatagacaaatcaagtgactgtggtcctatatcaccgctataagaaaggaatgaatcggttcattatttcaagagcaaatcaatctcattgagctatcataggcatagaagaatggctatgaatacaagttgtactattcgtcctcgatggcctcgtggcctgtgacatgtcgtaagtatgcttttaaccagtcattcttgtgtttcgctgtatttcatccagtctctgtgcagcggcaccactgttgaagttggcaaagctgaacgttgagatagctttcttcaaatcaaagcaagagctccgtcacaaaattgaagtcttttagcccaagaacaaggtctccctcccctggacctaggggacgatcctggattacaacgaaggggaagaccatggggttcccatccataacatttggtattcccgcaaccggttttggtgttatattcacatgataggcacaataaggttgctgaagttatgccggctgtctggttagtagtggtatgtttggggtttgtgtctggagggaccagatgtaattccaagttagcgggcggggagcaccgcttagggccaactgccactgctcgaaagagatacagtcatccctaagaagaatgagaacgaccattctaatgtcgcccctagaatctgcgaaccatttccgtgtatcttagcgaagtcggccaagcgattccataacacccgtttcaataataagtatagggtagccaaagttttaaatcggccgagtgtaacgagaggggggtataaagccattatctgcttctttacccttcctaataccagatcggtaagttatcgatccgatctaagccgatccttccctagggatacctatggccttataataatcgcgatttatttcaacgaacttatctgtggcaatgtgatgttcgattctagggacgaccttgataaggccggtagagccctcccattgaaatcgaaatgcgattcccccaagaccgcggtggtcgcttgtgggtgcttcgattaccggtggtgacagaccgagcaccacaatcactggttgccgtgttgatgctcctcaaaccattcaaaaatgtgctgtgcctctagtcgcagtctcgtcagttctgaggagactacatgccctgcaggcaggtcagacattagtgtgggggcgggatccgacttcgtctgctcattttacgcctttgccgttagcaaagttaaaagaaaggggaggagatagttgaaaagacaggtaagaagacatgtaaaaagaccactcaaaagacacaacaaggccgcatgagcgattattccctgcgacagggagtatggttaccgacagccctgcctgtgagaaaggatgagagcaaggtccttcactgagagtagttgttagagaggagaacaagaaaattgaagatgttagggatgccttacatagctatagaggtggatccatggatcacatggccgcttagtcatcctactctggatccccactacaataacaatagttatgatcgttcattgtgaatagcaaaacatcccgtcttctccaagcgcccggacaagccgaacaattgatgaaaaggagttcgcgtcgatcgggggtagtgtaagcccaatgacactgtgcaacgaggcatgcgcaagcacaggggccaagtcgcgggatccaaaaataggaataatcaaagtgtttcctggacggaaactttcagagattaaactgaaaagaacagatactacacttgatctaagccaataggcaaagagagctgaagaagaaagaaaagaagaagagattctgggggcgcgggcgggtatatatacccaattttggtcacgtgcctttggttcaaggcggtatgtgtcttgggcagtacctattagttaatctggtctgctagctcattacagcaggcggtgatggccggtgaaattctgggggcagggacaccttcttatagttatcctgagggcggtcggcttctgccactatttacaaatgagacaaacagcgacatatgctcgcttaattaaacatgtaaagggtaacgtgatgataaccacaatcactgttgatatcagggtgatactatgcactgcacttgctatagacaatactataggcggtcaaacttgcaaaatgtcaactggcattggcgtgttttgattggctcgatagtctaccccgcctatgggcccgcttaatatggtgcatcacctgatgacctcagaaggattacctggatttcacatttcgtatattggcccttatctttaacctcaaattcccgaaaatttagacatggcagaccacttacattctcgcgaaggatctgatgcttccctcaacaatgcatcgattgcttctccacgatccagcaccgaatctcgctctcgaaatccacttcgcatttcagcaaaccaccagcatagacaaagcttgagcgagtcgcttcgcggcccgccaggttccccccgtgcacgccggcagccatcactcccacagtcggccatccagagccttatcgataatccaccgccacccaaggctagcaaccctgcctttgttggtcgtgattggagagagatatcagttggggagctggtcagcccgggcgacctgaagtttgtcgagcttgatacaggcattgaagaggcgacgaacgtgagtacatcacataggcagcattccctgtcctgactaacatgctcgtccaactagattttgattgattcaggtggcgctgtgctgttgattcgcgagacacctgagtccacttctgccgtgggcacattcgactatgccgatctcaattcctatctccttttagcagcgggcctgacacatccggacgaagcacatcaagcgtcatatgacgagctagccaagaaagcccacaacggcgtgcccattccattaagagatgtgaagaagttcggtatggagaaggagccgctgatcaagctgccagcgtcggccaatgtcttggccgcggttgagatctttggtggtggtgttcaccgggttgtggttgtcaatgagtcaaatgaccaagaagtggtcgggattttcagccagttccgactggtcaaattcctctgggaaaatcgccgcagtttcccgattattgaagagctctacccgagggctctgaatgagctagttattggatctcaggaagtgatctccatcaagtgagttgttttggtgatctttagcgctgtctaaccgctaattcgtaattctcagtggtgataaacccctctctgatgctctccatgtgatgaacaatgagggtatgtcctcgatcgcggtggttgataactacttgaacgtgcttgggaatatctccacggcggatgtcaaggtatgtgacgagccatcttaactggcaaagtttactcaccatttcgtagctcttgacccgatcatcttcattgccacttctgcataacacctgtacccactttatctcgattattctatctacacgggggttgattgagggtaaagactcattcccggtcttccacgtcaatcctggatcgacactcgctcacacagtcgcaaagatcgtggcaactcgatcgcatcggtaactactgcaaacttgagatataaacacaagatgtactgactgctttagactctgggtgaccgatccgttatctcccacctcatcaggaccgccaactccatcgcaatcttccgtacacctccctctttccaacagtatcagcccagctaccggaggtactgcaaattcagaatcttctgaagaagctgtgacatcttatgcacagccctctcaatatgccgcccctcacctaccacctcctaacccacccttcacgtacccagccgtggcggtctcagtgccatcacccatctcgcattctattccctcatccgccctagacggagcccgagtgtctggacgcctcgccggagtggtcagcttgactgacatcctgaacctgcatgcccgagccagcgggctgaacccggccgacccggccgactctcgtagccgccgccgacgcagtagttcgtcgagccagagtgtccgccgcagcggtgacattggccgggagcttttcagtcgtggtggcatgtaagagcatacactacgttttaacttgggctctactgcaaagcatgttctcagtactgtatttgaacccgatatacgcaatcgctccgacgtgcttctgttaccaagcctaattctattcagcccaactagatatgcatatttccatgttgtcacacttcatcagccatacaagataggaggcaagcggatggacctttgaacgttgcctagcctgtcattatcgtctttagcaatggatattatttccattgtggatcagcattacaccaaacaacttgaattgactatctccctacgtagttcctcacttgcattgtagactcgaatctcgattatcacgtctgattcgagtccccgccataccagataaaccagatgagccagcatccatatcaagtcaggatcaacaatcatcgggaaaagccgaccaaacccacctctccacggcgatcaggcaaatcctccatcgtacggacaaagtcgaatactatccactaatcccatacccgccatcacccggagaaccatttccggaatccacaacgcagtcttattgtgtcccatccagaactgtccagcggcgcgaacaccaccacacacgcaatgcacaaccagcagcaacggagaagaccgagtccagaccggcgtgcttattggtcctcgtatgccgtcatttaaggcatttcgcattggattactgtgtttgattatgattcgggtacagacgtcgatcagctggaggtctcgaattatgagtggatcggatgtaagcgagggtgcattttccgcttctcactggcccgtcagatttgagctacccatcctgtctggaaggtgacaggtctggaatcgccggattgagggggcttggactaactagatggtgttgcttactgtttggttgagatattgataagtctcaagtatgcagcaccaaggaacagtgataccgatatctccttgtgagattacacgtcctacgataaaaccaaagccagggtctgtactaactcaagaaggaatgagcttagaccaaatcccgaagatcctcgactcgctaaaatctggggatgatgttctcccacttgtcgtggtggcaacaccacatccacagtcagctcttggtctcgtctggactcctggagccactgatgctccactgtgcaccgagagatccggactgggcgctgatcatggagacacaccctggggaatttccgggtaaattggggttgtgattcggggatattttaggactttctgttggttgagaaggactggaaggtatctgtctaggtgatttagagaggatgttgcatgatcatggccaggtccaggtctcaagttgacatgattcatagctgtccatgaggtacagtatggatatagtttagtaagaaatgactcaatccaactaattgcacacgacgatagcgccatcccaaacgaaccaatctagactccatgtctgattggcctcaacagaagaagaacattcagtcgctagaaatcacctcaaacgtagtacgtaagccgcaacaagagcgaacagacgaggcaagtccagaatgcccgactcacgaatcattccccccagagctatcacaccggggaggcgtctatcaccaacccatgggcctatcatctaccttggaagccaatccccccatcccaatctgacaatctgacaggccacccactggatccgcaagccaccaacccagcgtcaaacgcaagggaaaaagtaaccgccaatcatgctcccacacgtgtgcacgggccagcgttgcagtcccatccagctggaaaccgacagtaagcccgtgggtgggtgctggacctggccccgttgaagctgcacggagatcccccctttgctccaccaggcgagacgagttagagttctatttgctgggtgtgccgatgatacccatgtctcgaccgctggtacgcggccctcggacttgggtttcggccgtggtagaggtgctgattgactctatactatccatgggtcagtgcggacgctagtttgctgttggccaattaacgtccggacttggcttcaaggctgggcacagctgcaaccttaaccccgcaatctgggattctgcaggtgattcttttcttttcttttcttttttttttttggtcgtgtagtcggttacatactttgagggattgcgggtcttggatttgagatctgggtataggaaatatattcaagttgttctatctaccactcatagtacgtagatagcattgatatgggctgacaagacaaacgcatcaccctgataaaacagaagtagaaaacgataagtcgatcctgcacgatcgccgttgatccgtaatcccgggaacgcaggggcgggtaggacagcagccctggagccaattccgcagggcacggacactggcactggcacggggcacggagcacgggacacttggattttcaatttcaatttcagtttcaattcttcagcacgaaattcaaatcccacccgaggagctaataactccataactgcgcggaaaaatacaggatatttaactattaggccataccaaaaatcaacatattctaatcagagaccccatccgctctgtttcttgttttgacagaaacccgcggggtcggaaacactcctgagatagcacacggtaactgtgacgagacgcgagatcaaggaaattgcaatgacagagatagagaaagcaggattcccttttcaaaagtacctatttctatctagcatgcaaggcctggcctgagatatgctagataatggtccagggtccagggtgggaaacagggaatcggggatactgtattgtattgtaattttggtaataatggaagaattgctgccatgataagtgagtagtattaggatactgtatcacactctacgctagcacagttgtatgtactcctatatcccgtttaaccctattccatgaatagctggtcatgagtgacagcatagaaattaagtcgaggggttccacagttgaggatggtctgatcgctggaatgactttaggtacgtaggcgagaacctgggtgggtttgtgttggacccacgtagcagggctagaggattactacagagtaccaagggtgcggttggtggagttgggatgcggcattttcaagggagaaagtgcgtggacacaagagttaggatttagggaaagctaactaacaccagacgcaattctggttaaggataaacgccagaagtcattcctatgtaatgtgggactggggaaagctatagctacagctctactggcacggcccgacggagcatagagtctgggactaggtttatcgcagaaaagaaaatgagatgccaataatcgcgcagttataagggatggtggagtagccccggattaggatgcggacttggcgaggttgtttgcggatggatgcaacttaggtatagaattgggggaattagggaaattagggaaattttattatgaagaagatcagtggatggattttggctcatgtcacattgaagtatagtaaaggaaaatttatgaaaagaaagagcaatcgatacatacagacatcaaccctgactccagttcaggatattagatgtaagatacgagaagatataaaaaaaggtacagcaaatgtgcaaagccacccaatatacagacccaactccgaaagacccaagagaaaataagtacctaggtatcaggtatcatagatcataataggcatgatagacagatgaggttaacaagagacgctggtgaaatcatcaagagcgagaagatcgtcaaaagcaaaaggctgatcacggtcggaaagcggaacattcgagttacccaagtggaacgcaaactgactgaaatccgtgaaatcaggatccatctcctcatgggagaccataatgccatcactgttgaacttcgcaccgggcgacatcgtagcatgcgccgtcggcgacagcggggtgttgggagtgggacagaagtccggagtggactgagtgcccgctgggagggcctcgatcctgggagagctgagactggagggagccacctgcgagtgggaaaggttcgtggtctgagtaagcagattgagtttgtgcaagttgttcgatggatgggactggccgcgcgaatgaccgtgggtaggatggtggccagtggggcctgagatggatgctgagggaatcggtggagccgtgtgttgcagaggcaactctggtgcggacgcaaggcgatcccggaactgatgcatttgggtcgctgtgtcaggcatttgagcctgctgcatcatttgctgctgccacatctgcacggcctgcgcgtcggtgggcgtttgtgcaggggttgggttctgctgttgcatgggcgcccatgcgggtacttgggagttccagcccggtgcggaggcttgttggctcatgtaggctggcatctgcccagactggttgcctgtcggtgcagagaacatgtcggagtatggcgtctgggaaccgctcatgctggccatgtaggactgggcactcgggtcgtacgacgccgtaggtgataggacatagccatcacccgtgggcattgggcttgccattgagcctgggccctgggagaaggaggagcgaatattcgacagatccaagctcatcttccgtggaccgccattgactccattgagtgatggccgcggggtcatatggcttgctcggcggctgtggatagaggagttgttgaattgagcgcgtgctgcaaaggcggccagtagatggtttttgaactgctcttcaatttgctcgttttggcgttgcagcatgagaatccgtttttcttgataccgctcatcgacctcttcatacatggcctctttctccacgatatccttggtgatgtgaaaggccttgcccgtgcgcttcttatgcaacatagaagcccggttggcagactccagccgagcatctaagctgcgatccttgcgccgtgaggcggcgataaaggctctggggaatggttagggtgcacgttcggcccctccgtgatacgagttacatacctctcctggttctcctcccgcgaacgggggataggcgtaatatcctggtcgagatctggcaggggcatcctggacatggtacctggtagaggaggtggatttatgcaggaaagagtgttatcgcctggccaccggagaagagggggacggtaagttaaataccaaaaaggctgaggggaaacccgtcagcgttaaacccaagctaagggccagaaccacggatccgagccgatcatagtttgggcgcttggaaaacttacggccgctcggtccatggttgccccgtccctctcctctaggctagtctgctcgagagcgccactacggaggagccaaatacgaatgggctagatatggtgccactcatggcccctcttcccggagactatttcctgcttttccaggtaaataatatgcagcataccagatgtgcagttagcaaattatttttcctttccagattagccctgaagggtctagaccattcgctgtgaagtggggcgttactctactccagacagatcccgatagatgtgttctgatagatgtgactctatcggggatcactgcagatcactttcctgaagcgtagactgtcatctccagggcgaaggttttttttttgagtgtcttcgacatcacgagaatcataccacgtgattggccggattaggaaggcttcaaaagaaacctgaaattcaaggctacacctaccttggagaacatcagatctatgataaggttacagtacttcggataacaccgattacttcttggcgagtataaggcaattgctattgaccgttgttattgacgcttgagaaggaaacacctggttcaggatctggatagtaccaagcgaaaattacgaggtttccgttgaatatgaagttctccctcttccttcctaaatggggacttccttggcgtatctcggcgcacctgcagggctaggcgggttgccttaggctctagggttcgcacatactactactactactactactactactactactactactacttctactactactactattactactactactcttactactactactcttactactactactcttactactacctgtactccgtactccgtacttacctagtaacgtagtcagcatttccaattagcgtagcgtaaccactatgtgaccctaatagccgccaatgcatcaactgccggcatactcccgaaagataactttctcaccagcaactcatataggaaggaggtcttaaatcaaccataattgggtacaaaatacctcgcttaagtcaattgtcgcgaggcgtagaatcatccatggatattagcacaaaccaaagtacgaaaggcataaaccaaacagtcataccagttaaacatcatacatgatgttccgagacatgccaattgatcagtcaattgatcaccgtcactagctgaaacatcctacacgacacaagatatgggcttattcaatccctgctcaccagagcatctcccgatccctattccttcttttggcctcggacatatgtattctgccggatctaccctcatctcatagacagcgacgccatatttaaagcccacggtatcgggggattcgccaccggtctaaagccgagttacctaagctcacccggccgagactaggccgcttcgagcccctccagatgtcctccccgatgtcgccactgcacgcacaatccgatatcatccgaccgcattatttctctacgcgaaagtcctcgaaagccctagtttgtctgactctgattggcatgacacttcacgaattggacttttatcgttagcgattaactacaacgtaactagtggggtactcggcgatcaccccgctgatcgtccgtatccatgtctaacggacagagtacaggatgtgtatgtacgtacacgtatccagatcatcgcgacaaagcacacatccatgcattggcatgaaatcaacatgggagatcggaattaaccctcaggatcaatagccaatccccagattccaccagaaggctagtcgagatctcggagaacgatcggggtcagaacctgctccataggaaccccacactagcagccacaatataaaccgacgacagctcatgccgcacacttccgccaggacgagtgggagggcgccgcgctgagatctgcaggcatacatgcctagaagggaatctgtggctggctatatcatggtggcggtggcgcgagcgctggagctatgcagggggaatctcggcggatttgattttctgtggtttcatggttttttctttgattcggggtgcatacgacggacgtgtttggcacatgggtttttagcgttagggttgattcttcaaggtcggtcttcggtggttactcggttaggaccgtaccgtcactctgggacacttgatgttgtaggacggagtatagcaaggacatcgtgctctcatggacgacagggattggttcattggtctgttcctactaccttcatatgtgcatcattgcgaacaatcagtaagtctaccaaaagcacatcgtcccctcgccacgaaagaaaaccattgcaaatgaaatcttgtttataaacagcatgaataggtaaaagacgctaagttctcaatgagtgcaaagccaagggaaaaggagagcaaacaaaggtagagaaggcccaaatcagccgatgctgctgcgcggattagaccattcaacggggtgaatgctagattgtccgctcaggcaaactctcatcagacagacctggagggaaacacaacagcagaataaagttatgggatcgccatggcttcttacgcgattcccagcggcggcaccatcccctgttcctctcgggcctcgcctccaagcttgtaagacaccttgaatcgaatcttgaccgagttgcccttcccagcatcaactccgtcaatgagcatctcctgttggacaccattttgctgctggggtgcaatatctcggcctgattgcggccgaagctgtagcgtgtaggactaattcatcgtcagcaaactcatccaaaactggactgcgttagtagcaaatagcttaccttctccacagcgacctggaaatggagatctccaatacgctgactagttgtgtttgaaaatatagctacaacgtggatctggcgtggctgcgtcggcacccggcgcgcagcgaagtcaacttggagctgagagttaaggacttgaatcttattggtcgatggaagcgcattgctcgctggcaatgcggatgcgaaatcccactcatcatcttccactggagcggcctgccgcggcggttgaggagacggactcgtgcctcccatcaggtcaagcaatgacgatggagcgggagcaggttggctttgcgccggtggttgaaagggaccagatgctgcccgtgggctagcagagacgagcgatgcaaatggatcagccgctggtggcggggtcgctctggactgggcttggggcgagacccccatgacgggcgtgggagattgagagacaggtcgcgaactgttcagagaagcaaggatatcataattgggtttgaaggctgttggcgcatgctgctgaggttgtgatggaacaggcggcgttgggcttgctggcatggacgcgaagttcactttaatattggtcagtgatggtgctttggggtatattgcgccgaggtacttactggaaggtccgagagagataccacctccgggggagggagtttgtccgcctaatgaaagaccgagtagatcattctccaaggagctcccaccgtgggatggcccggcctcgttaccgttggagctgggttcaggctccgggtcgaaatcgataagagagagctcgttgtttgcatttgttgaaactccagtcgtggtgcccagtgtacccttgggaatctgagatgcagcatccagatcacctttcttaactagcttataccgctcgattgtgcgatgtatgctgtcgttgatctccaatagcttgtggacggcctcgggatcatccgattcttcctcgcacattttctggattttggggtgagcgctttgcaaagcactcgcaagttcctggtacaatcgtcagagacctatcaaccggcaaacaacacacgggacgttttatcacctacctcgaaaacttcgccttctgggagaggttccccgggcttttgattctgcagcatctcttccagaatcttggctttttgttgcaccttaacaacctcctccgcagcctttgctcgataatcggttttatgccgattgtcgaatcctgccataaccttcatgagccggttcgcttcctgtagatcggcgggagtgcctctccgaatcaactcctggagtttggcagactgcgcttccctctcttcctcttccatctcatctgctgagcggaggttctagccaacgttaatttgactccgaaaataccatgtgggggccacatacatcacttggattcaagaccgcagcatcttctcgacggacctccgggaacatatatcccttataaagcaacagacggtgcatgtcccgaatgaagcctaggtcatccttatagcgcgatgtctggcagatagtctggcgccactcctcgatcgactccaaaatgcggtgttggaccctggagggccgtatgggtggccgctcggggaacctgcgaaccaattcattcagaaactcctttgtaccgatttggagatggaatggatatccgcagttcttgacggcaatatcgagtagctagaaaccgcggttgtcagtctcccccgcctcggctgtcacttgagctcacgtaccgccaacgccaacaatgcgacattctgattccgggaattgatgagatgaactatatccaatgcggcttctcgcggcctgagaagtgaatccatgagtgtgagccatacaacattgggtgtttcgcttacgcattgcctttcttggagttgattagatccgcaacttcaaggttcagggccaggttcggttcgtagttttgaggatcgcaggcatttcctgtagataagtctcagtatgaatcatttgtgccacatttatttcaacactgaactcacggattgcccgctgcaacggcgaagcgcctggctcagcgtagaccccgaagcggtccctggccgccattcgtgcagatgcagcctccaggatggcggtggacgaggaactaggagaggaagtgtattagccggataaagagggaggtactggaaagtacaagattctagaggagatgtgtacagtcgcgaacggggatgcgggcggagaacccgtttaggctgcacgtgtggcgcttgtgcttggccttgatcttttttttcaaccactacatttaccaccacggaatactccaagatactccaagcagagtatttgaaaatcctactagatttcgacctcgtcattcaccatggtccgccacaaaaaagataacttcgcgcgaggaggcaagaaattcaacaacccccgcccccgagtgccccgcggtgatgaagaagttgagggcgcaacctcctcaaggcctccttacaaggctgcctgctgggatatgggacactgtgatcctaagcgatgctcggggaagcgattgatgaggctcggtctaatgcgggagcttcacattggccagcggcaccccggcgtaatcgtctcgtatgtttcgcagtttcgcagtgcttttttggtcctcttagcttgcatgctgacgattgactagtccaaatgccaagcgaattatctctcccgcagacaaggatattatggagcagcacggtgctgccgtggtcgaatgctcttgggtgcgagtcaaggaagtgccctggtcacggattggcggaaaatgcgaacgacttcgtatgtgataagaattgggcaatgatgaactggattaatgggatgcttactatacatagttccctaccttatcgccgccaacacggttaactatggcaaaccatggcgtctgaactgcgtcgaagcgctcgccgcttgcttcgccatctgcggtcgcttagaatgggccgaagatctactcagacatttcagctatgggccaactttcttggaaattaatcaagaacttctggcgcgctatgccgcctgcgaaacagaagaggatgtgaagaggacggaagaggaatggctaaccaagatcgaacgggaatacgaagatagtcgcgtcgatggaggtgatgatgtttggactaaaggaaacactaatcgtctacccgcacgaactgatgaggacgacgacgacgaaagtggagacgaagatgacgaaaatgcgggcagtgacgaagaggaagatgaggacaaggatccatttgcgatttccgatgactccgaagacgaagagcaaatggccgagattcgtcgcaagattctcaattctaaagcgttcaaggatccggaagaggaggaaaggcagcagccggagaaaattactcggccggagcagctatatgtcgactcggatgctgagtccggctcagaaggaagcgaggacgaggcatttgacaatatcattaatgcgacgacggtcactgaccgcacgggaatcaaagcgattcagcagcggaaaggaagcgagactgtctctgcctcgttctctcgggcggagatttctgccccgaagaaatggtgaaagtgaggcttattgtacatcaattgcccatccactcaacgggccgttagcttcttgctctgagagctagcaccattttctggagtctcttggtggtttctcccctggcaacacacatagacagctttattgctttgcgagtcctgccatagcaagtgcacttgattcttcaaattgagtccggcattctgctgtgtagtattgccacttgctatctcgtcattggggtggtttcatttctctgaaggtacgcctcggtcaattcacgggatcaccaagtttccttttacgcgacctacgcaactacatccgctccttcaaatactatgtgttatgactcattacaacgatatctgctttactttgtactcggcgagcgacggactatatccaccggaaagggaaaagaaccaattatcatccatggatggcacatatcaaattcactattttcttccaaggttggtttagttcctaaaatcatagtgtgtggtctcaaaggacatagtcgtgccttccgggccaaattcggaatcggagcaagatcaccaatataaccttgcaagaccgaaattaccacacttaagactcacaagaacttgtcaactcacttaaacaaatccaataatagttctcactcactggagccacacctgtccaccaaacactgaacccagcccatatcgacgaactaaatgcgacggccaccctcgagctcaacgggcaaacagaaagatggcacggaaaaagaacagcatgaaccgcttactacccaaagagccgaaatggacagaatccgcagttaatccgcaatgcatgattaatgactttgggatatcgagggaacccacgccatcgcagcaggacaacacgattaagaagtacgaggaacaaaacatacagctaagacgtgagatgaaggaacgggggaataccatcaacaaccttgtacgacaccacaaagaaaccgtgagccagtttgaatataacatggcaaggatggcaaaccagctccagaaacaggcaaagatgatcgccgaccttgagtggcagaaaggaatgctgcttcggaatctcgaggaacagaccagaatatcatatgcgctaggacagcaagatacgaagacgagggaagtcttcggtaacatttccagcacgatgttcttagaattcgataaacagacaggcataattgacgaaaaaacgagcgctatcctcaaacttgaagcacagaaacaaaaatcgctagcgatcttgagctacaaaatggaaagatggctttggtgcttgaatatctcacaaggaacagtgaagaatgtgcctctctctgggactaggacagaagaggagaagatgtacctgatgataaaggcagtattgaatgcctgtggggagagcgatactaatggaatgagccgaaccagtcgtttcctgaagaatataagacttgtcaaatgcgaatctcgtgtcacggagggaccccggagtaaaccaacatgtttattctgatcctatcgtctcggcctaatgccggtatgatatagaaccgaccacaggcaatcgaatcgaacaaagatggaggatttgcagttcaacaaagaattacattaaacatccacgtcactgtttgctacccagcctaaccattttgcaatcatgttataccccaaattaagattccaagcgcagatccttctcactgacgttgctttccgcagaaactgacgctatggtgccgatgacatcgcgggcaatcgacagcatgatgtttgggccaagaatgcgttaacgagtgtgaagaagtatggcagatgaacgggtttgtgtctgtgtaaaccggacgaatgggagctcgactaggtcgatacttccgacggggagtgtatctaagagcgtttcgatggtgagatgaggaggagacgggtgaaattgtcgaaggcattgttggaacctccttggctgctataaattgggtttagtctcgctctgtagattggtttacatgcgacttacctgctcaagtcttgctttgtgccgctaatgaattatacaatctgatttatcgattcaagatgtgaagttggttaggctttgtttttcttactagggcaaccataataaaaggccttgacgggacgtctaggaaacgaagatctagatcatgcaagggctagaatggattttttttctgaaaattgaacccgatatgcaaggtattcacgggatgatgatcgatatatacaacgctttatatatgtctgagataatcaagaaagttgattatcgagtcattgctattgtgttggttatcactccccatatagtttgcttcatatcaaaaggtcatttcgatatgataaattaagacaaagaaaggcatatatatatctgcattgttaaagggattgtcctactggatcgagggattccatagaatattataagtatctcagtgctcctctagcgtcatagatgcttaatcaaaattcagaactatctatcttggttataaaagcccaaagttttactaggtctaaaataaataaagattgatataatccgagatatcgttcactcaaaccgttctataaaagcactgaaccccgcgatggcggggcaaacgcgcccaaggtcatagatatcagctcccccatttaggaattctcttttacatgaccttgtattgaaaatagatagaataaatgtcaataatctacttctcatttgagttagtacacgtggcgggtgaagctcaaactcaccggagtggaaatccttttcacttttcccacaatcccgcaatccactttcaacaacctttgggacaccctcgaacataggccaaaatgcccgataaagactccagcacaccccgtgtcttcctctaccgacacggtatgttccagaacgtcaatatctgctttccgtagtctgactatagtccagggcagacggaatggtccaagaacggacggtacaccggaatcacggagcttgagctcactcaagatggtgtcaaccaagtcaatgcatctggcaagatgatcgtcggatccggcaaattgattgacccagccaaacttgcgcatgtctacatcagtcctcgcaggcgagcgattcagacatttgagattgctttctctgatgccgataagcaggcgcttaatgatgcgcataaggtctctgagacagccagactcgccgagtgggactacggtttgtatgaaggtctgttgaccaaggaaatccgagccttgagaaaggagcacggtctggataccgagagcgagtgggatatctggagagacggttgcgaaaatggagagtaagtctttttcaaagagaaactctttcgaattatatccagtctacgatcattatatctgacaagtcaatacaggtctgcacaacaggtgacagaccgtcttgataatctcattcaagaaattcgcgcgatccagaaggacaatatgcacggagaaaatccttctgatatcctgctggttgcacacggacatttgctccgtgcctttaccaagcgctggttgggatatcctatggagttccctctttctctgatgcttgaccctggcgctgttggcgtcctcaggtaattcctttttctcccacttcgctggcctggcagttgacctttatttctacttgtagttatcagcaccatagcattgatgagcctgctatgttggtcggatacggatttccgttgcaggaatgatctgatatgtctggataatagatctcatagaagatagcccggttgttactaaatatagacttgatacatggtgatgaagagtcaatggggattctggcctgagtactcgaaagaactgtaggctctcctccaggggccgtagattattcatagtctaattccagtccgtccaattgatcctcgaagactgtagtaaatgggatgaatattgtatgagatcaggcaaaatagacgaaaatggattatttgcccacatgactagaaaagagaactttataacttcagagtttctaaaaccttctactgaaatcgcatcgaggctatacttcagatcaccagaccagttcatcaagtcatgaagttcaccgagttcatcagaagttcggcaatgcccgttcgcctgacctggccaactgacaacagatatgaccctgcccctgtcaccccctaaatgttgtgtcttcacttcaaatatgacatcaatacgagtgtcttcaaaggcagacaagatcaggtgggaatagaggctcttggctgaagagcaccccggatggcactaacgggggggctatatgatcgcctcacccctgatgggtttcttttatttctttgcaactttacgccctgacatatgcttttcaaggactttcctctggattgattctactaccgttctatcatagaagccttcaatcttgaaagtggcaaggtcgccaatatcatgccgcacaaatcagacgagttgtcggtcgctgaggctgaaaaggaggtccatgaggcatcaactcccacgtctccaacaccagcacaagaaaaacgcggttcgaccttgataagtttcttctcgtcttttcttggtcccaagaacccgcttgcacaaccagcagagccacacaagcagaccgtatggctgctagacaatacagcgtaccagccggtaaatgaggatgcaaacgagaatcatctgtgctggcacgccgaagtagtcgcctatatcttcgaaacagaagggcggaaagacgcgggcaacctcgtcgccgcgatcgccgaccacatcgggctggacggcgaggtgggcaatcacgacgaagcacgccaacgcatcgcagagcgcgtccagcccttccttgaccaggtgtcgccagcgcgcacagtcatgctgcaggtacccacatcgccacgggcgcaatcgcacggactcggcccgtccgaccgtaacggcatcgtcagccaaacggttgatatgggcgaagtgggcatgtatgacggggaagttgtgcggccgcggctgcaggatttcggcgacgaggctgtgtcgatgagcacgacctttgccgcccctgagggctggctggtcgtctcggatattgacgatactatcaagcgcactatgacgcctgagccgacgggagtgattcgcacaacctttgcggatatccctgagcccatcgctgggatgccggagttttataaatatgttcatgctgagctatttcctgcgtggttttatctctccgcgtcgccgcataatctttaccccttcctgcatgacttcctggatgaacactactccccgggcacgttggtgttgcgcgattactcgtggatggatatcacggggcttatcaagtcgcttactgagcagacgcaagagtacaagcttgatcggctggagaagattcgggggtggttcccgcgtcgaagggtgctttgtataggggactcgacgcagaaggatccagaggcttatgcggagatgtatagtcggtatcccgagtggattcatgctatcattattcgcaaggttaaggatgtggcgggtatggaagagaagaatgaaccggggaggtttgagaaggcatttgagtatgtgccgtcgcatatttggacagtctttgaggatccaaaggagttatataattttgttgatgggctgggtatggaagaccaggccttatagatgtaataacctgtgtatatttagttggaatggctattttgaacttttcaaacatcactctcgtgacacgcaagggaataacggtctttgctgtttgtgccatgacaaagacaatggcaacctttactgcaactatcaaatagatagactatgatttccaccgtaccttgggggataatgcaagcagcgatctatagacccattgattgtgatcttctatcgcactatccaacttccacgaatcccagactctatatataatattttcatgccaaaccaaatcaaatagagatataagatcgaattgctgttcattgcaatggaattgttcgggattgtcaagtggcaatgttgacttaagccctacatacgtcacgattaggaaatgacctctgatctatagacgaaatggcgaagaccatacttccaaatcgataacttccttacgagaaatcattgtaaagtctcaaagatctctaaactaagaagatgtatcaagatccaaatgatactatgcagtcagacatacctcccacgcagcccatcgtggaacactccccaaagcatctatcagagtcctcaacacgctccccaaaagacattaagccgccatctgagccctcaaaacgcgcatcaggagcgacaagaggcacatcagaagccataaagcccccttcacatgctggaaagctcagctcatcaacgctgaacgactcaccattcataccactgtcgatgcgagccctctacttcaccccagacggatcagacaacgacacacccgatggagtcccagaaggagaaatcagcgacgccatctcacccgacacaagcacaagcgtcgtgcgccagaaaggaacaaacatcgtcttcgacgctgggttcccgaccccgcagccctcccctcagcaatacctgctgaagatcgccacagcagccttctgtcacgacgagatccgtctcgccagactcctcaatcccccaaagaccacgccgcatatcccactgcacagtctctgcgggacagtcgtcagcactccgcgcgacgacgaggggcgggaagaaggcccgaagttcaaaattggtgacgtggtcttcggcgtggtgagctatacccgtgatggcggagctgcagactatgcagtcgcgactgagaccgagctagcgctgaaaccggataatatcacttttgctgaggcggcggcacttgcgctgccggcgttgacggcttggcaagcactttttcggtatgccgggcttgatcctgacttgcctggcgggttgggcgagggcgatgatgagtttgcgaatgggacggggcggtggctttggcagcgtcaacgccgtgagtccgtgctcggtagcagggattatggctacgggcgccgcaaaagcagtaatagcggcctgttaaatcatactataagtggtaatggtaacgaaagtgggaacgggcattgggtttggcagtggaatcgcggcggctccagaacaagtgccagtggcagcgtcagcggcaacggcaacggttccgacattgacaacatccctccagctgctagagcggtcaatcccgcccccagtcctacgaatgtgcgtcgcgagagcctaatcagtctcgtcagcggtaatcccagtggcaagaaaaccgttgctcgcgctgccagcacagttgaccccaatcccaagagtactgtccgccgcaacagtttgatcagcctgatcacgggcaacaccgacgctccatcctctcgcgctgcgagcacagtcgatcccacagctaatcccgatgccaatagcaaaccccgccgcggcagctctagcccgagacggcgcagcagcctgttaggaagcataattggcgctaattccaacggcagcgggaagccaaaaccgcctattatccgagtactcatcaccaacgcccgtgacagtgacatcggccgtatcgcagtgcagatcctgcgagcagattcgctcttccccatagcgttccggccgtgggtctgtgtaacctgcacgcaagtcgaagccgatatcatcgagaaggactgggaggtggacgagatagtcatcatcccgcacctcccgtcgcctgaagagtgtaatatcgagaaggtgttccgcacgcgccgctgggagccggttgatattgtactcgactgtgctggtggagaagtattccgagctgcccatgctgccggtgtcgttaaggaccatggggctgtgttgactgtcgtggatggccaggttgcgctgcagtctccgcttgttcctgagaaagatgtgctgggcgagaggaagcgtgggattaaaagccggtttgtgcctgtcaatcctgatgggccggctctggagcggattgcggagctggtggagcagagtctggtccgtgggagggaggttactattgttgatctttcgcatgcggtggatcttttggcttctggggctgctgggacggcggggagtcggcgcggtgggatggtggttgttagggttaatagtgttgcgttcacgtagattgtcatgtttatgcattttaatacagagatatcaaaagtaagcacgtcacagggagcaatgatgtcgaaagcaacctatggttgtctatcaatttgaaaagtgttgggccacttactcggttgggccaaatatcactttcgcaatgcccatgtcccaaaagccaagtccaagaaaagaagaagggaaaacaaggggtgatgtaaatcaaagttaatgagatattccatacaagaataagttttgacccgatgactgcatatgaaagaaaagaaagcgatgctctgccccatcccacaagatcaaactacatgaacagaagaagaaactgaagttttgtggccgaggtggaaggcaagtgagagagagaaggcgcaaaaaagaagtcgtgaagaacaaaagacaagtgtattagtacctccgttagagtaaagagtcaagtctggtaaaaacgctcaagcatgcggcgacaatctgtctacttgttagcacattcaagggttgaacgcggtatgaggtgcagcttacctccatctgaagctctttatccttgttccgattgatctcctcgttgaccacttgagctaaattggctccaatcgcctgggaacctccggccttcctgccaaacggccattgcgaatactctgctagcaattcatccacctgcgcgaaagctctctcgcgagcctcgtggctcatggtgaccaaagcgttctcgaggacgtttgcggcgtatgcggcgcagaccatggtgattgagcgaaggtatcggtattctgcgtcttcgggaagccatgggctaggagggataatcacagtgcggttactgcaaatgttgcgcacccgtcggtggagctcgtctttcgcgccgccgtcggccacaggatgcgtcgccatatcgaagagaaggaagttgcgcttttcggttcggagaatacccttgtccacaagacccttggctagtcgttcccggacttgcttcaattgatatccaatcttcatcaggttccaggtttcgcctaacaagtagccccggtcagcaacgtcgcaacccaaatttctgctatgggctgatctcaccactcagcaaatcaatccatgagttgacgctcatcttctcgcttgacttcatcatcttcagcgtctcgtccagcaagacctccccagtcaatgtatcgtcgatgacctcgatgatgcggtcggccagggggaaacgtcgccgcgacgaatccttctgcatgcttatacggccgcggagcgcgagctcaatgacgatacaccctcgcagggcatacgagatgttttcgttccagaaagacagataaccctgttgcggcgtgggcgcgaggtcagcgatcggaccacgaatcgaacaaagcaaagttggggcatgagataatatccatgaagactcacctgtttatctttcagacccagcagcaagatatcctccatcagagtcaatttgggctgcttgccccgttcctcgttttcgctgatgtcgcgggggtcgaatgcgatcttgtggccattctctgcattggtaaaagacgtttccggtccacggttatccgtcgcagagccatttcgggagattggcgatgacactcggttgtcatcttgttcgtctgccccagcgactcgaccggcgcctctgcggcgagtcaagcccccggctgctgaggccatgagatcgggtcgggttgggcgggggatcaaaaagggatggagagagatatggccggagatgaccaaaggcttccgatctgtatgccggtggttcgaatggtctgggttggtgagatgttgagagggaccgtttaggccgaaagtctgcggttgaagtgggactttcggtgtcaggggaaaccagagaccgagtgggcttagccaaaacgatacagtgtcgagtatactgaactaaacccgcctaaatacgagaggaataggcgactgtaaagaatggagttgtgaaaagggtgaagttcaaagtaagttagttcggtgatgtggctctttgagtatcggcgggtgcttaaacacccaagggctagcaatctccgcgttatgagtttatttgatggctctattttttgaaaaattgggaatatagttaagttagtatatatgtacaatctattcttatatttcgatatgcttatgtactctgtgtttttgtcttgtgttcactgttaaaccaaaatatgtagataaatcaacttaggactacatccatacattccatggcaatcatatgagatgtagaggtaactatatacctaaacatatactgaaatgtctagacgcatatggtgaataccactacgtagcagttctgcttcaaaattgcataaattgcataaattgcactcaaatgatatacacgatataggaaagaaaagccactggcatgtattcagcatacaaaatagcatgtcggttgagtgtcactgtgtccagcaaaccccactgatgccaacatcccgattctttttctatccgactctccaaccgatcccaggtattcaaattaaatatttagtgggctgtgaaaaagtcagcacatgtaaaggaggaaggggtgctatgggattcacataccatcgggctgggccaggatgtactcgacagccttgtcaactatacataatattcatgtcagctctggtaaacgaaaaataacaaggtcatcaagccctaacataccgctgtggatctggtcggcctccttgtcggggatctcaatgctgaactcctgttgagacggttagatacccatcatataatatacaattgatgcttttccgaggaaaaccgggcgcgtacctcctcaatggccatcacgacctcgacagtgtccaggctgtccagaccaaggtcgttcgagaagtgggaagtgccattaatctgcaggtcaaataggtttagtcaatgaatgttttcggtcgcctcccatagctcatagcgatgtaaaggtggcgacggtgcatccgacagataatcactgaccttgctggcatcggagacctaagcatgaaacaaatgcagttagtaatttgtttttcgtctatagccgatagatggcgagatttccggggaaacaacatgacgcaccttgtcgaagttcttgagcaaattgactatccggccctcggcctcgctcttgctaagaccggcaggggcggagtagagacggataccctgagcgaagcgaggagtgaattgagggacctgggcagcaatgggggagctgcggatgtggaagggagccggggtcctgatgacacggggggcggaagccttcaaggaacgaacaatggcggagcggaacatgatgaagtagattgatcggactagcgcaaaggctgaaaagatctaaagtattaaaaagagatggtggagagtaaacgggtagagattggggaaagacggctgccgcagaagaggaaagatgtgaggtcgcgcccagcaaaatcctgcgggccaatcaacgcccgacagaaaggaatgacctaagccggaaacctgcaaaccaccacaacctcagacttgctccccttcacctccaattgaacctcgattgccccatatctccaacctcactctcctctccaaaaccatggccgccacccgctcggtcgcgaggctaatcgcctaccgtcggccgacccccttcggattgctgggctcaaccgcaaacttctcttcttcgacgtaccgcgcagcaaccccagcgggaccccctcaggccgggttccgcctgcccccgcccaagcactgggatcagagctccgagtccgccttggacaaggccagcaaatatttcctcatggcagagatcttccgcggcatgtacgtggtgcttgagcagtttttcagaccaccgtaagtccttgtcccactcaaccttgccggcgatacggatcgcaatccaaaatcaatggcatcgaaatatatcaactaattgcgttgcaatgttccagttacaccatcttctaccctttcgagaagggtcctatctccccccgtttccgtggcgaacacgccctccgtcgctatcccactggtgaagagcgctgcattgcttgcaagctctgtgaggctatctgcccggcccaagctattacgattgaggccgaagagcgtgaggatggaagccgccgcacgacccgttacgatattgatatgaccaagtgcatttactgtggctactgccaggagagctgccctgtggatgccatcgttgagagtgagttcaacaccctcaggttacatctcaattgacattcaagccggattactaacatttttttcttacagcttccaacgccgagtatgccaccgagacccgcgaggagcttctgtacaacaaggagaagctcctctccaatggtgataagtgggagcctgagattgcagctagtgctcgtgcagatgctccctaccgataatctatttccctccaatctgattgggatcttcaggcaaatccacatctattccagatgttagatgtgtgaacacgaagatgctagtcgcaatacccatccattcaagaggcactaagcctcgaaaaacaagaatgattttaagcccatcacattactgtacataacttgccctcgattgtgttatcatcttgtactagtcaattcctaaaggaaatgccttttcctggaaccctggcccccttgtctcttttattttctatgttatggaatctagcaactctttttcttctagttgagattcatatataaatttggcaatcccatcttatatcttcgctgaacactttttcgctaaccgcataaatatagtacatcttgagatctataggtttacataggcataaagacaaaaggaagacatatacagctcgataagaaaatgatattgtattcacagataaatcaaatcgctaccgatgctgtcatgcatagacataaagtgacagactaagctgccaaagacacaaacgtaaacaccaggcaccttgatctccggatggatatttcccagttcaaagtctcaaaacactttttttagttcgggggcttctgtgtgcgatcttgttttagggatgtaaacatccaagacacaaagactgatctgaggggtatgcagagaaaataaaaagaagaacgtaaaacatgggttgatgtaaaagcaagtgagaaacgagataaaagtaagccactagatagaagcttgtttatttcttcttgccaccacccttgaagctgccctcaaatccaggacgagcagccttcttctttccactgctgctagacttcttcttgccccccttggtgcccttgtcgtcccggcgcttgcgaaggttctcctcgcgcttgttctggcgctgttccttagatttagcgacagtgtcaatgcggtccctccactcgcgctcagacttcttctttgccgtttccttgcgcttgagggccttcttcagcaaagaggtatcgtcgcggacacgctcgccgtgagcacgcttcttcgcgttcaaccaaaggtccttctcttcaacatcggcacgcttggtagggtccatctcttcgagacgggctttcttggcctcggcaaccttgagctgggaagccggatcacgggcaccgccagtcttcggcttttcgcgtacgttgtttccggtgatatctgtctgctggccgtctgtgaacatcacacggccgaaggagaagttgttgctagcggagctgacggactcggcaggggagcggggggatgccaggagcgatccagagccaccgggcgagaagcggcgggccatggcctcgtcattcttcttttcttcctcaaccttggccttttcgcggagttctttcttgtgtgcctttctttgttcggccttttgccggcgggcttcgatcagctcttggcggttgcgtgcaggcttgccgttgagtccatctgcgtggcgcttggcccggagctcatccagacgcttctgtagacgctgcttcaactcttcgggtgtgtgcttaagaggcttgggctctgaggatttgacgtcggtagagacggagggaggaacgatggaggaaatggaggaggtgccggattgggggtttgaggtatcgaaggtaggagagtcggtggtagaaggggcagaagaagggtcttcctgttcagcgttgaactcaatagagaacccttcctcgacaacaccgtcatcttcttggtcgtcatcttcatcctcggacgcttcagtgtccttggctgcattgccgttaggcttggttgcagatttttccgaatcctcggttggggtagtcgatggcttctttccctgctgggctttttccttccgggccgcatccttggccttctttttctccatttgtgcggcctttttctgggccttcttctcttccttttgctttttccgtgcctcggcctctgctgccttggcggcgtctggcttatcagtcttttcaacctgcttttgcttcttgatgttggcggctccgcggttcagtccttccttaggggtctccgtgcccatctctccgtcggacgagtcggactcgagggtgccatcctcccgctttcgcttgcgtgcgttttcatccatcacgtctttggcggtcttggcggcatcggggttcagcttcgcccgcttcgcctcgcgtgcttgttctttggtttgctttttgcgttgccattgatcctaaaaatgaggatgatggtcagacagagatcttcagaattaaagataaagccaagaacacaagctgactccagtcccaaagccgctaacgtatgaaatgcaacagggtcacatacacttgtatcttcttcgccataataatatttggcggggatcaaagacagcagaccgtcaaatgcctgcgcatggctgcgcagccgttccttgagggcagtcagctcgcattccttgcggggcattctccgagtgcacaaacctcgatatcatccataatattttccagtacacagaaattgtattctggaagggaaagctagacagtcaagcgcaacgaaaaattttggggaaggaaatcttggcgctacaattgtctccgcttcggctggttcaccgccctcacacaacaattttgctgtattggtccgtgcattttgatagacaggctccaggtcggttgattgttcccttcaccgtattctttctattcatcctttttgattgtgctcttttctaccttgatcttcgattgattccatggttatgcattgttttattcaatacatgaataggcactccatgataaatgacgtggatattctctccacttctatatcagacctgatccacgaggccagtcctaacgtctagtccagggcatccctcgcttttgatacttgtcacattcccatacggccaaggatctgtccaaatcacgtcgaatctgaaacagttagcgcaggacataacacaaggcaaacaaacgctcttctgtcgagtcgcgagtcgagggttccatgggacactcgtctcccagacgtatgtcaagcaatgcgaatctcatactaacaagaagacacatgacgataaaaattacctaccgcttatttggatattcaacaggctcccaggcaccaagctcctccacaatcccactcatagtcgagtgccgccatgcaaccaaaatgtttcccggtccgtcatacgatctgatcgccttagccacacatttcactttgttccgcttgcaatgtgtgtcaactctgagacccagatctctagcaaggggtagaacggtttcaaacgcacggccatgtgtgccatctacaggcagaaagcatattgtcagccatgtctatgacacttagtcacctgcgtgcctcgttgcagcactgtggtttcgatttgctctcgattattgttgtaaacctaccccatttcacacgaggtgccataatatgcccgatgttgtactccgagccttggccgaaaacatgtcttaaacactgtgcccgcttgactccgtctagtgtcaaaccatggtcgttgggatcctgaggcttctcgccgtgtcgaattatatagaccgttggatgtgattttgcggacacgataccgaggcaaaatcccagagctgagaagaccgattgcagtcgcatttttggcacatacactaatcaacccagtcgtatacaaagtaagcgggtaatagctaatgtatggacagtcgagcagtggaagaccacagaaaatgatctttggggacaattataagagtgtgggaaaaagcaaaacctcatggaaatttgcttatgtcgatcgggtgcccttagctctagttataagtacaggacaccattttgttatggagtcacataccgaagagcacaatagggctgacacaaaaaaaagcaaaggtggatcagcagatgacattccaatgatatgatcatccaacagcaagggcgactacagaaagcataaggttctgcaagttgacaaactacaggcaggcgttcggtcgatgtgctatgatgcagtggtttgattggtctgcagattatgcatgttcattgtactgcatcgatcgactcggggttgggaatggtctcggagatctgtacacagtacatatgcagcggtgtttatagtcaagagcacatgtacaactgcgatttagtttataaacgtatggaacagatctaatgacaatgaacctgtggtcggagtatatctcggatgtgattgaagactctcacaattcgatagtggtcagcgtgcatgctgtacaacgtaggatatgtatgaggaccctaggggtagatcaacctactgtcacccgatcggacaagtcccatatgatagtcccatgtttaaactagtcatgcatcaatcataatcgatcaactagcccactagaaacgagagcatctaagtggtccacggcatggagatatgggaatcgggggaggggcaacacacaagccaggcttggtgatttatgaaagaaaatggtctggtgactggctcctttgccaatattcattgaaggcagtaggtgtctactaatttagtaattcctcggtcgtatgccctagatatatattgttgacaccaagtgattgacgttgtacattgttgcctcccgattcgccatcatgtgatggtcacccgagcatgtcatcattatgacttcaaagcaatttgacttcgatgttgttttgacaacatgttgtcagtcgtaatagttggtatatagacttggcttcaggcgctattatctcttaggatcagaaatccacgactcgtgatgtgttcggcaaatgacgccacctttaaactgttctgttcagcttactccgtagcgtaggcagccacataaaaccgtcccaatacggccgatacagaggagacctcgggagccaatgtgcggcagcggagaaagcgattctggaagatccgtggaagccgatagatccgcgtaatctattttgggcctaatctggtaatgtataaaccgaggctgagcccggcatagccacagtaggttacagtattgtgttccaaagttggaaatgtggctgtgtaagtgacttaatcagaggctgagtgcatcatccatggatagatttcaagtccgaactagtaaaagacggtaaatgcacagatgcgcaagatgcccaggcgtacagggctgaaaatgcccgacgcttaccaacgctgcgcctcccctcgttccgtaacgtttcgcttgccatgtggggttcttaccgtcagccctgtggttacttgaagtcacctcttataaaaggttgcccccctcacttgacttctcttcatcacttaccactcctcacatctacactaccccaccttccatcagccatcaattttttatcaagccaattcaaattacatcatgtccggttacgatcagtacaaccagggtggctacggccagcagcaaggctatggtggccaacaaggctacggtggccagcagggctatggccaacagcaacagtacggtcagggtcaagagggctacggccagcaaggctatggccagcagcagggttcttccgactactactccggccagcagcaacagggctacggccagcagcagggtggttcttccgactactactccggccagcagcagcaaggctatggccagcaggaccagaaccgccaggggtatgtccttccctctccattcacttcattcattatgtactaacagatcatagtggctatgagcagcagcagggtgctcccggtgaggcccaggagggcgagcgtggtcttgccggcgctctcgccggtggtgctgccggtggcttcgctggccacaaggtcaaccacggtttcctcggaacaattggtggagccatcattggtagcatcgctgaagacgctgtcaagaagcaccgcaacagcgacaaccaatctcctcctcagtacggtgccccccctccaaacggtcaatatggcggcggccctccttcccacaatggtagcggcggcggctccatgatggatcagctcggtggcttctttaagaagtagaaggtttccgatgaacctctctcttgcgttttctgcctgacgacacggttttcatgaatttctttctttgctcttattatcccaatgggtcggcatgcatttttcttttcgccttccgccagatcgctttcatttctcatgggtttttttctcctccttaaagaggcttgtaccatgacagagctgcgttgatattggaaatcgcctttgtgtggtctgaccataattttcagaattgcaacgtgattaacttgcaacattccttgtaaaagacagtaaactaattaagtaaattgccattgcaaatcaaaatgatagacacttccatctgtgtgtatgttgtagcaggcggaggccaaaacacaaccccaagtggaatagcgtaaggcctcaggcatcaaccgccaagcccgacaaaagttcgagcggacgagtccccagtaacctcctcgtcagacatatctgcaatttagcattcccaaaatgattatacggaagctttgtatgcgccagggttagtttggtccaattgccgctatcatatttaatgtctctgctaacgacatcccacaggccgccagctccttgctctgagccgtcgagccccgatctccagtcgtttccaatcgacattgcccgaaaccccagtcgagacattgcagacatctatcagagatgagatatctcgcccagaaaaccccctctttgagatggtgcaggcgcaatctgaggccagcacacccgcacaacaagagttcacatcagacgagcctcaaagtgagccgcgaatatcttcccggagattcctccaacgcatcaactaaccttgtctttcttttcttcccccaggaagcaatttcaaaaagctcggcacaagtgtgaaatcctcctacgaccccgaaaatattatccgcaaccctcccaagccatcccagatctccctggaaatgctgctcgcagcaggaacacacctgggccactcgacctcgcgctggaacccacagaattcgcgatacatcttcggtatccgcgagggagtgcatattatctcgttggacgtaacagccgcgcacctccgccgcgccgcaaaagtcgttgaggaagtcgctgcacgtggcggactaatcctcttcgccggcacgcgaaagggtcagaagcgggccgttgtcaaggcggcgtcgctggcaaagggctaccacattttcgaacggtggattccgggctctctgacgaacggcgagcagattctcggccactgtgagacgaaggttgtcaacgcgctggacgaggaattgcctagattcaagtctgatcttgctgatcgcccgtcgctcaagcccgatttggtgatttgtcttaacccgcttgagaatgttgtcttgctgcatgagtgtggcctaaacaatgttcctactatcggtgttattgataccgatgcggatcctacgcgagttacttacccgattccctcgaacgatgatagtctgcgggctacttgtcttattgcgggcattcttggtcgtgctggtgaggcgggtcagttgcgtcggttgaagatggcacgggagggtcggacttcttacaatcctatcacagccgaggagctgcgtcttgatccgtttacgggtcaggctcctggtggtgagggtcagaagaagtaggggggtgcgagttgtgtattccttctgattgcattttcctttcatttttagtatccggtcgattgcattgaaacgacgggactctgtattgtatagatgattccaggtcttggtgttgagatatgtattaacaactttgagtcaattttggttctttttttacttgaatctagcctgtaacgaggggacgatacatcagtaacagcttctggaggggcttaagcctgtgatcttcggtatagatagttgggccaaagatgtgatctctcctttaatcccctcaaaaaatagcaggataaaaggcatcactttgccgacctgttcaacgccaactatacacttacatcaacgcagacgagatctatcgccttggaagaaaacggaaagcaacaaggttcacggtcttggtaccatccacctcggaaaactcgcggaatcgctcaaatccacatttcaacagtaccctctggcttccactattgcttgcttccgtgatagcgatgaggcactcatccactacaccttctccaacgaccattcctttctgaactccgacctcccgctccgtccgaggcaattctgaccaaaaccgcagccaggaactcaagaactctgtcgcgatgcctttcccccaagcgtccgtccgaagcatgtatccaacttcaggccacccatgcgttccaggatacagatgacagccaccgataccgataagctcgcccgttttcttcaggcagatggcgcaattggcggtgataagatcgtttggtggtaggaatgcatccagtttggattttgtctcctcgagactttcgtcgatacaccccgccttggtccatcgcatgacttcttcctgtgtgcgcaagacgtgtaactcttccaagtcggttggttggaggggacggacgagtaagcgatccgttgttattgctgcgcgctcgctatttgcggggagcgggactgtgggcaagaatgccttcacaattacagattctccctctgtggccatgttgatacctactttcagtgctgctttccagaaatacctgtgtgtgcggcgcggttgagtcactaaaccctggaatctattctaaccttgaaagtgcactagtgggacaaacccaccttggcctaactccgaactataattggcgtgttgctttggtacataaaatgccgatatttctaggcaatgtggcctattgatcagaaagaaaggctagtatgcaatttatcaagagagatggaggacggacaagagatggtagacagagcgagatttatttgccctaactgttaaatgtgggtgccccaggaaatggtacaaacccagtaccatcaatatttgaccgaacgacgagctgataaaggttgtgaattcttactggagaatcccaatttcatcaactggtaccgagcttctgattcacagcagttgatgatcttcggcgatatgggcagtggaaaaagctttgctatggcatttcttgcggacgagctggtacgaagaagcaaacaccaattacctcagcccaaggtctgctattactattgccgggatgatgagactgggaaaaccgtcttcatattatcggctataattacatcgcttcctgggcagctcacgggtctgaagaagccatttgttcagtggtataaggaggctcagacttctggggactttgatccggcgacaaatttcaaaacactgggagagttcttatgcagagtgcttgaagcaattgatcgcccggtctttatggtgattgatggcctggacgagtgcaatagagaatcccgaagtaatctcctgacaatattgcgaaaattgtcacagggggttttgctgaaaatcatactgtcttcccgtgcaaaggagagatcttggaacagcttcacgatacggctaagatcgaaatggtagctgacgctcatagagatggcattatcgtcgcaaaagtcgtcgaaagaaagttgttcgatctatcgccgaatgtcaagtcacttgtcatcgacagacttacttgtctagcaaaaggaagcgctatatggacaaggatgactattaagctgatctaaactcgcaaaatcatggcatttgatccgatgaaaagtttcttggaagaaatgtcactccccgaacagctattagaggtttacagcacgttgctctcctgctgctcttcaaacgatctcgaaaacctcaaaattgccagcaccgcgctcaagattctcgccatcattaaccgaaatttgagcatactagagctctcctgggtcgttgcattaggtacgactcaacatgtcactaccgtagatgctcttgccaagctggtggatcaccagagagtaatgaggttaattcaccagttcattgcccctgtcgagttcagagacgtaaggaagcaccaggttcgactcgtgcaccagtcggtgaaggagtttgtactgaagaatttcgtctcgaatcagccatggcgacacggcccaatctcaagagaacccgatgatatgattcttgaccagcgctatgaaagtctgcaggcatttattcttgatatttgcgccaggtatcttcttcttgaagacattggcagaagaactctgttctccgaggagcttgtggcaattgcggagctaccccaaggatccgatatattcaatgataacgaagggtcgattgagtatgacggacattgcacatgggatgcctgggaggaggatatgatcaattttgatcccactgatcgcggctttagagagttctttgtctacgcatcatgccattggttgaatcacttctgcaccattacagctgaacatattccaagtctagaaaccatagagaagatatgccaagcgggctccactcgattgagcaattggatccaacaaaactgccgcccaggctgcacgttaacgccaagatttgagtttgaaagcagtctgtacgatcctctcagtatcacttcgctttatggctcagtggcaatgctacgagatatgcttgaaaactcatccttcgacaagaacggttttctcgaacagtcagctatgagagctgctcatgagattttccgatgagggaacgtatcaagcttggaatcatcttcttcggtgatcgacttggtcatcacctacgacatcttgactttttccgacttatcatcaaatggtggtgcaaccgcactctcaccgaccactaatgcgatcttgtatttgatcttgtcaatggtgtgtcaaatcaaatggtccaggaacaatggggaaatgaacttctgtgcatagctgctagtgcaggctgcatgcaatcgagacagaatgcacggttgcactgttaaatagcccttctcatcggaatgagaggttaacagcacgtggataattggaggttataaccttggaatctagtcgggattttgttagatttctcacaggatatgtcatcttatttacttgccgtgatgaaccctatagtaagtggatggatgcaaatgccaacgtctgacttggcgggtaaaattctcctggaagtccaccggggcacattggggtaattgacttttgttcgaacgggcttccttaggcctgtgttttaaagttcaatgcggctctacaatttccatgggtatacaagttccaaccttggaaaagcttttaagcttatttttccaactcaacctttatgacttccagctgttctttgtttattggatttctttctctttgcattgttctctttggcttcgtagtctttgcgtagccttcattgcattgagagttttctttgaactccaagccgtctcaactctcaactatataaaacccaacactggccaccgttaaattccgtgagaaggacatactatacctagatgtaatagttacctagcgtctttatagactcttctattatctcatttcatccagccctttaaccattttcacaaagcagaatggacgacaattaccctctgtgggaaaagaagggaagaagcctacagaaatggatcgagaactaccgtgcagcgggttgcccgtactccatttccactttcaatctgaagcccagacatccggactataccgtcgatcgcacatctgtgcatctagacgcaaaattattgaccgcgcttaacatgagcaacgcgaattccacctgtcgaaaaattagcattaggcagcgtgacgaaggtccgccagtgtggtggattgggcgcactggaccaggtgtgatcttgattgacgatatctttaagtccaagagaagcgacgatccatatatatccgagttcaccaaggcagcctacaaactggacttccccttggacagtctgaagaatgtaattgttcccaatgtaaacgaagtgaacaccatttcgtgtatcaaaaaggtgtacaaatcccgcgaaggacttcgttatccatccagcacacagcaggcttgggagccgtcctcgtccgagttccatgctctgctaggaactggaatcggcaaaatcattgcagcgttcgttctgtgtgcatggggccaagggagaaagcgaattgtgagaattgttactttccacattggtgccgacgttcacaagctgtatatgcggttcgatctggatgatatgtgagaatttcttccttgctttcgttggccatctgatcgttttgaatgtttaccttgaggtgagtaggtagaataaattgtctgtgagagtttctttaatcgcatttatatctaggaattggcaattggcgatttcgacctaatacatctctgacaaggcgtgatttttacagcagcgcttcagagcgactaatatagaaaaaggtgcagatatctgagtcggatatcatgatatcatgatcataaggcagctggaatttcagacgaaaacaaaacaatagtatgtaaacacacggagaccgcggcctcaaatgccggaaatgaccatatttctagcacatacaacgaaaatcccaatatggcacccatcgctgcgattgcaaaattgttctggtttcaatccactcaaggaaatatcccaatccgtatctcattaaggcatatgatcttcataaaatcatcaaaaacacccggcgtaaaagaaaaaggaaagccgatcgtataaaatcaaatcaaacgacataaggcgcaggtctgctgcgactggagctgcgatgacgcgagtgtgagccagagccatgaccacgacgactagaatgactgcgtctccgaacaatcgtctccttaacaaccgggcgatgcgaatggtacaagaacagcgcaagcagcgcagtccagaagaagaatatcgtctccatgataccaagtgcgaagcaagccttcagcatagcgcaggtcttgttgacgtccagcgacagcggattatttgtgctctggccataggagccgaatggacccagagagatccagacggagccgccatgccagctggcacagttggcgttggtgataaaacggagctcgtagacggctgcaataaaggcgccgacgaagagcaggtccatgaacgcgacgaagattgcggatcgctttgttgttgagaagcggattagcgtgtcgatggcccagaagacggcgattacgctgacgatgaagaggaccaggatatatggtggggtcagcaggtttgctttcagatagccgttcacgaagtaggcctatattcagagacatcattagcgggagactcggaggggtattgctgatcggactggttaacagtggacataccagcatgccaatgattggaatcaggaagacgatctcaaccaggcgattgaatatgaagaacacgctgccaatcatcttgacggttcaaagagagattgggtttcagatctttggaatgtgcaactgtcccgacgtgcttggggtatgtccgaggcgccgtaacaagatcgtggggctacacgagcttgcgaaaaaaagcacaggcagttgcgattacagtgcaggatgcacgttttagaagacgcagaaggataacagaagagaaagtaaaaaggaaaaggaaaatagacagaataaagaggaaatcaaaaaaaaagatattcagcgtcatcttgggccgaggaggctgggcgactcacaacgcacgatgtcggtggctggggtatcccgagtcctccatgatgggtctcggcatctttgatatattgattagtctaagaacctgcatgagcagtcacttttgatccacgccttgcatttgattactccgtatccctcgggatgataggttagggcatgagaatatagatgatcgttgtcaagccaaccacataagtggagactttacggggaactactggactggacttcattgcacttggaaattgcatagaatactatttctgtttgaagagatagaggactcttgttaaattcatgcttggtcgaggcaacaaattcaggttctttgtttccagtgccaacacgctcataatcatattagtacagagttgtatcaccggccaccgcaataatccatggcttcatcaaatcataagcaaataacttgggcaattaccgctctgaactagactgcaaatcatcaatgaccccgtcattcatgtttacatggggatgttcgtcaacggacgccccggacccgccatcgcgtcagggacatggattcccgcattggccgtcagcggctgtgtctgcgacacatatgcattactggggtcatattgatgcgcattgtggtcggggccgggattctgccccatcgtatgaccatgtcgcatttcatacccgctgctaaggtcgtcctcactcgacgaccaagcaccgccgtcaagatcaaggtcgtgtggtcggcgattgtaaacattcgatggatacgggttggaggcatgaatataggtagaggtgtcgggtcgggcatgttccgatctggggatatctggcgggtccatgcgctcttcttcggggttgcggagagcagtcgagctatcttgcctgaagcccttgagtcgaactgtctccggtcctgaaggttcggtcccccaggttcggattgggtaggcgcggcccttgcgccagggttcggtgagcggtgggaaatactggcgatatgcgacaaagccgcagacgattccaagcatcgaccccgtaatcacatcgaaggggtggtgacgcgcgtccatgatacgcgatacggccacgagggttgcagctagtagaggagccatgatgacaagggatttccaggcctcaccgcgattgtccataacgtgcaacttcccacctagccagagcgatatgtagacgagaccggcgaaggaggctattgatcggactgtgttagtaatatgaaagactaggagaatcgcaaaaggtatacacacaactactgtgacctggatgaatttttaaggttagcacgtgcgactctgaaaagcagtactgggtcatatcgcataccagatggccacgaccgaaacccgtctgttaacaacgcgggatcaccggtacaaatcgttgagtttgacaatcctgggaaaaggtctttgctaccagcgcgtggttgacaacgatcaataagatcaggtctcggtttgccgcatgcgttcttcagcgcctgtgtaatgacgaacgcgagtccctgagccagcaacagacccaaaataccacaattgagctcccaaagtctgtccttccagcgatgcggacctcttagcttccgcttcccagacgccgcgtcatgtggcttatggtgcgaaaacaagccatcgataaacaaggtgtagaggatgatgagaacgagtgggaaagcaccggagatgcagagggcgtaaggcatgggaatacgttcatgtacggcgtaaggatattggatggagatgttggtgagggagaagtgttggtggaagggctcgatcgtgttgagaatggcgaagccggcaacgcaggcactatttccatggttagtacggagtaaagagaggaattgatgcacgtacataatgatcacatagtcaaagatgtagctgtggaattgttagttggatttgcggggagacctggggaaagtcgacacacgagataacaacacgcggtcgcagccgccgcttggagaaggggagttttgcggggatttccatgctgactccaaggcttccccaggaaattcgaaaattggagaagatcagaagaccagaggatcaaaaggcctgggagaaaataaacatatctgcctagtccagggcattgcttggcatcggcatgaatagcacctggcggctttcgttctgattggccgtcgcaaagtggctgagcttgtgggacctcagggcgggctatgtatacttcgatatccacttggacattaatacctagtacgggtactgctatatcaggttcaatagacagctagcggcccaaattctcatcccagttcgatatggggtagtggttaacctagcggattttcagtatctgacctccgcggccccgggttcgattcccggtatcgaagttctttttttctttccaacctgtttagtacggagtatgctgtggacaactatttcgacggcattgtatgcgtgaaagatgtacctagtttttgttgcccagccgacaaatagatccacatagttatacatattctctgtggtaatctacttaaaacggaaggagtgaattcatatactaatacacaagctgaagggacgctgacgctatgtgcatgcgtctaactttcaagatcaaccagaaatggccatattttcaaattcaccaaatagacggttagcttttgagaaagactacttccgtatagacacaggaccatcaaaatccgaaaacgagaagagaaaaatatcaactacatatcgacgtgaaagaggcgtcaatggaagtttacaaggcataagaaatggccctaggaatcacatgtctatagtcgtaaacagccaaattgcacagattccgcatttagcaagtggtgatgaacaggccgagactgaaagtgctgttagctgatatacaggcaaaagggaaagcgacgagaaaacttacggagaggggttccagtcctcgaagaagttgaagtcggtgctaccagcattcttcatctcataggtaacagactggccagccgggcaagagaaggtagagacaacgtatgagttgcccggggagacagtgatagtaccgaggtcctgggacaccgagggcacgttactaaaggaggttgaggaatcggcaggggaagagagctgagcgaagtcgatcctgccatccccattaaaggtgtaagacgaagtctcgagctggtcaagcctagggaaaaggaacacgaggctgcaggtcttcccagagtcggaatttgggatgtcgaagttgaacacggtcgaggtggtcgaggtcacgctgccgttaagcccagttccagcaggggtatcaggtgaggacgagtcgacaggaacaataaggtgagggatctcatagttgcccgagagggtagtgggacaaccaccgccggaggtcccagtggtcgatgcggtaggagaggtagggctagcggagctagtgggatgaggggcaccaccggaggtagcggggacggaagctgacccagtgggacgtgggctaccagtggggggaggcacggtagcagagccaccagggtgcgaaccaccactacctccgccaccgccgggggaagttgcactaggagaggtcccaggctgcgaactaccgccagtatgagcaggtacggtagccgagccaccagggtgtgaaccaccaccgccggggaaaggaggcacactaacagagatacctccaccgcctccgcccccgccgccaggggaaggtgcactaggagaggcgccaggctgcgattcaccaccgccagtgggagcaggcacggtagcaaagccaccagggtgcgaaccaccgccgccgccaccgccgggggagggtgcactaggagaggcaccaggctgcgattcaccaccaccaccgccgccgccgggagagggatgtgttactgtaacagtaatagggggctgcggcccggcaccaccaccgccgccgccgggagcaggctgtgtcaccgtaacagtaacagagggctgcggcccggcaccaccaggagctcctggaccaccggaggtagggcagctgcagtcagtgacagtgaccgtggtcgtggcagtgtgagaaccggtaccaggagcagggccaggcgcaggaccaggggcgggaccaggaccagcgccaccccctccagggccaccaccaccaggaccaggagcgggaccaggagcagggccaggggcgggaccaggggcgggaccaggaccaggaccagggccagtgccaccacctccagggccagcgggaccaggcgcaggactaggactaggagctgggctagaaccaggaccaggaccaccagtgcccgagcaggagtcggcagacatttgcacattcacacatccagtgacatccatcttgttaggggtagtgtagacattcataccagcgttctcgcccgtagcacatgcaatgaagtcagggctgttatggtactcaagtttaccctgggagttgacagagaaaccgggtgtagcagtcacaccctcatcacactggagttgagtagtgggagctgtcatatcatcagatgcatgtccttaagtagttgatatatagggcattgattaattcacttacgagtgaggatgcacccacggccgctggagtcagtaatgctgccattggcatcgatgcagtactgtgcgggttgcagattactatcgccaatacggttctggccatcacctagctggccaagtgtaccggaggcaccgccggaggaagtaaggtgaaagcagcagctatcagcgcggccaacgagggcgttagagcccgcagcaaagacagcgacggcaatgatgttcctcatggttgctgttcagcgaatatgaataggctgatcagctagtgaatgaacacggcaccccttcttaagaagatcgcgagcaattgaacgacctgacaatatataccggtagagttgtgcaggtggcttgggttgagggagcaaggttttggggagagtgcatctttataggcagcagtgggggttacgattcaaacagaatataacatcagggcacacatggccggcaaaagtccccgagatcaaacacagagaagttgcatgttgtcagccattcatgccaatgaccgtggggaagaactccgatggaccagtaccctggtttcggagagtagacaatagtaggtccgaaccagccggagcgagatgcgtaggaacatccacaaacgtcatgttgaacagagacccaattgattgaggtgtaaagaaatagagtatgaggatatgcttgtttctccactttaaagcaggatctgaagacatggacaatggtcactggccgggtatgagagggatgtagactcaatgttttgctaacgcccaggcaacccgattgaaagtggcaatatgaatcttcccatagatgactgctaatttgagtgctccaagaggctcaagccattcaattgagttccattgttgttattaggcagttgagagtatattcgtcacgatactcatctcatgctctagtttctgatccagtagctagtaatatcgtacatatagacagttatatgatcctagtattgcatcgaacttctccaaaacaagaaataacaatcatttgatagggctagtcgtcattgacaactgtggatctttgtgccatacatatagaatatagtacattgcatccttcaggtcatagagttaaagcaaaattgtgatacatataaaggatggctgctatgttgtacaaaacctggacttgtgtagcaaagtatagaggcactagtacagcatcaatcacttcattcataagtatgatgaaagacgaaaatcgaatagaagacaccgagagattggatcggattgtccacgggtgtcatcattaaacaatatggaagtggacccccgaattggacccgaccaacaacgccctactatttttatatcattcaaccatggcacatttatatacagtctgattttggaattattagccgcctcataccatttgctctgactgttctgcgcatatttcatatgactgagtcttttccacagtgaaggtttatcatactacagcgacgcatgtctctactgtctctattcatcgcatatccgacgaggctcccaatctaggattcattcatcgtgtcacatttctaatacaatatattgttacacagggagcaagatatggatgtgttcaggaaccaagcaaagtcactcctaatgcaacccgatcaatcgatcgcaaagctgcatcgctgccgcataggtttgatatcatgatacagatttgtgatgtcggacaaggttaagattgaaatggcggatttacaatacatagtaagctactgctttcattaacctcatcttgttattataccgtagcgtacggaatatgtttcttcgctgatcgcctccacccgttagtattgtacatatgccgggcaagtttaaaccgacgggccgtgtcgatctcaatgtgagagtgactgggtagctaagtggggcttaatgaactagagtattttacaaatgacgagtcttcatgcgtcataatgtcgtgaatttcaaatcccagtgccgagacctgtcgataattactactaatgctacatagacagaaatgcagtatccgactcggcaaagaggctgttccagtccacagcccctgagtccacattttcatcgaaaacctgccagaggtcatctagagtaggcaatgcggggtccattagaagctcatcgaagcttctgcctgttggatatgctgtgcttgtaggtgctggagaggcacagacaaggcctgaagaagccccagggccttgagcggtggattgagttattgtgttttcttcaacagccgagcccgaagcactgtgccgacggagagccgttttaagggattcaagcagccttcctgcaaaagggagttcctctttagccctttctagaattgaaaatgcttccaaaatttccgtttcctattcctgccggtgatcactcccagaaaagtctatgaggagaacaatgatcgccacacagacggaatatagtaagcctggaagtcttagccgcattgtcgcaaaggggaccacctctagtgagagttggcgttcggtacgaatcaccattcgagctgcttccaggcatgctctccgtgagtaattgtatgtaggatctttagacgctcgcgacaaataaggcaagtgaagcctgcatctttgggcatgaagcagaaaattgatgatgtatcgttgtatgattattccgggagatctccaaggatcggtgtttggaagctcgtccgaccgatagtctaacgaaaagaacgagggtagactctctgcgaattcacaaatcttgccatcaatctgtttcgtgtgctcatagtccgggcttcctggatctgaaattccaaacggagcacaatctgtgatttcgcggcaaaattcgcccaatcgaatccgttggagacagtacgacatcgatgttgggtcggtgagtggctttccaactccgaccatcccgtccacaatatcttcatcattcgcattgcaaggtttgttggtcatcatgtggcgtggatcaattgaatatgtgcccttttgcgaaccagatagttgcgacatctgcctattatctgtgaactcgcattcttggaagaataagagggggaggaggaatactcaccaatcagtcgccacgagataccaccacactcttctacatatctctgctttcgcagaggatggcgaaggcatatctagatgggaattgtatggatgatcgatccgatgcaaggaaagttctcttccaaacgagatggcagtggaaaccatatgtcgagcttggggggtaatccccacgatgttagcagtcacaaatatgagaatgatcatcgcttggatatcctctatggattcgaagtgtttgtaacgcgagtaatcgaccatctccgacgcaagtctcatccaatgtgtagactgcgcaactgcttcttcaacggtcgaaaatatggagttgcacatgtcacgttcagcccagagcgacgtggtactggcgagaatgccgaggagcaacgaaacgtgcccaatcttgactggcttgctttctctcagattacaatagagttcctctaccatggtatgcactgaggggatatgaaccacatgatggaggaaagtgatctctgtgatgtacttttccactattatcttcgtttcgtcgtggagtggcagccagatacatcttttcatgggttgagctttatgtacgattggttcagatcccactgcattacggatggggcaagttctgaattcaatctcatacttgaaaatattaccctgtacactcttgtcagtcgatttcccatgattttaatttgatcgaggcctaccagtgagcctaacgatgatatctcgccttcaagccaatttaccgccgatgtggatgactggctttcatgaatcatggatgattgattcgattttggggtaggaggagaatggagtgacgaagcctgggtagtatcttgtgccatgggactagatgctggtccattggtgatcactatctcctccaacctccgcaagcggaccagtatatctgcatgataattgctaggcaatttatcagtctgactctgaggactggaaggcaatgctgtagtgggatagagctgacaagtcttgccccgactagtgcagttggagcaagggaattgccggctacacttgagcttccttgatcgacagaaatggcaagataccggtcgcgagcgtgaagatctaacacgctgtttctcgactccatgcattttgttccgaatattgttgaggcagtgttcgttgagctctagatgtggcgagatgccattacggagtcgaccaatcaaatgccggtgaatccgcggaagttccgtgcctccgcggatttcttactatgggaactatgtgagagacacgaggtatataagagcctctctacactagaaaatccatattaactcatcatccttctgtttcttctacaacatagaatcttcttatctcatttgtgtcaatatggactccatcattgctcagatccgagctcttgcccaaaccaccgatgaagctggtcggttggacatgattcagtccctcacacgattgaaaattgagcttcaatctccaaaagatgtcataatggaactggcagtaccggtcggtgggcacacaatgcaatttggggataccggaagtgctgacagttgtagggatcgacgagtgcgatgctccgaatttgtgcagatctgggactccttcgctctctcgcgagaagtgatgcacccttgactgtcacgcaaattgcggagctgactggagcgtctcctctattactaggtaatgttatctgagacgaccgtacttactttgaattctaaaacaattgttctgttcagagagaattcttcggtacctagccgcaacagacatgattcaagagacgggggtcaatgaatattctgcaaacaaggtcactcatgtcttggctgatcctaagggcgaggccatggtataccacgggtaggctacatagtcgcctccatctagcaaacatccctgcttaccagccttctcattagatacgacacgatgggacctgtgttgcaagcaatgcctgcattcttcgctgaaaacaactatcaagatgtcaccgacaataccaatactccgttccagaaagcccacaacacgaaactcacctcgttcgagtggcttatccagcagccaaagcagttcgagcacctgcaaaagatcatgactgcacttcaaggatcagaatggaccgaggggttcaaacttcttgatgatgaagcccgcaaggttccatccaaggtttcacccactgacccacagccttcggagaaacccttcttcgtcgacgttggtggcggccatggccaccaatgcattgagcttggaaagaagtatcccaacctcctaggctaccttgttctccaggacttgccagcggcagtgcagaatctccctccaattgacggcgtgaaggccgaggcttatgactttttccaaccgcagcccatcattggtttgtctccatctatccattggataatatcaaactgactttccttcaattcaggcgccaagttctactacctccgcagaatcatgcatgattggcccgatgacaaagctgcaagcatcctgcgcaatattcgcgctgccatgggccccgactcgcgggtgttgatcgatgaagccgtgttgccggatactggcgctgactggcaatcggccatggccgatcttgcaatgatgacctttgcgggtaaagagcggaccaagcatcagtgggagtcacttgcagaaagtgcgggcttgcgtgtggaacagattcatacttatgttgcttcaactcataccgctcttctcgttttggccgccaagtgagacagacatggcctagagcggaaatttggacttatctagcaagttattttatcactcttctctcttcatttatgtcacgctatcactccgaacgtaaatcttttttgagatcgatgaatttctactgtgcgattcgtagggttgtgtcgacactagaggtaggccttgacttcgctgaagagcttgggcagacgaagagctcaccttgagctgattcgacattcgcacgatttggtggtctgtgacgcggttatggatgtgtggatgggtatttaagatgaggcgtggcggactgaacacgcctaagaactggtaaatctaagtcaagtgcattatatgatctccattccccacctatattggatgctgtagatacattgatagcaaggacccggcatatatttatagagcaatattctttgctagccacctaaattcaaaacgccttgctagccgagtagataacacaaaatggtaaagtcgctgggggaggaagaggacaaaatataatgagtgaaagagaggactagagcctccgagactaatgcggatacaggtcgtgaatcatgtgcgtgccgagcgatatattatgggttcttgatagggtccactcaatggctgctttcagaggtggtcgaatcatggagtatgggtggtggaccacgggtggtagtcgtacgggtggtaatcgccgattctgctgacaccattcggattcccggcgtccgctctgtcggcgttggaggttcatcattgttggtactttggaattgcgactgagtcggcgtcaccggagaggcagccacgggattgggcacatcgatgtggatcgaagacgagcggtcgataggtgggagctgttgcggctgttcagtctgctccacaacaggactttgatatgcaggggcgtcaccccagtccaagtactcgtaatcgggaggcggagggatattgagcatccccagatctccatcgtcgggttgtgttcctagtcggcccgagtcgtgtgtcgtggtcgcagccagggttagtcgttcaagctcagtagaattctgcgattcgctgatcgacgaagaaacggattggcctcggccggatggttcgaaggattgcgcggagtcactttgcaatagcggtcggctgtccgaatcgttcatgtcagaattgtgcgagtcagctcgaagtcgtgatccatcgtggcgaacacgtccaatttcagcatagctaacgctagcgatgcgtcggtcccgctctctctgattctcggtcaggaccgtggatacgtcgactgcactgttggttcctgcacggcgacgttccgtccgagctcgagtctcggcattgagctgctcaaggcgagcaaaatccccccgcgaccgagcttctcgtcgctcccgacggcgcgtttcgcgatcggctagttcctgacggcgctgcaggcgtatctggtacatcgactccatctgttcctcccggcgagtttcctgttcctctgcagtctccgggtattccacgaccatatccatcccaccacgttcaccctctcgggcgataacttgttcggtcggcttcgggctttgggaataaggtgggagggtcataatcgaacggatcgaggtatcgcggcggacgccatcagtggtctgcatctccggtgctgcagccgctccacgataagaggtattttggccagttctttgattcggaacctggccgtatgatgcacttcctgggccccattttttccatttctgcttgaggtattttcccggaaggtatttcggttcgtagtgatgttgtcgcatataacggaacaggaagtagacgcccacacagaccgcgactgcaaatatgacggtcacgcaacactaagagaacaaggtcagcgttaggggaagaggtcggaagggtcggaaatgacatacaataataactatgttgttcttattcgagtcattttgacgtttttgtggaatgtacataattgttggacaggcaactgagcctagagattcttaatggaaggcatagaacaaaatccccggatttcaagagagtcgaagaatgagaaaaaaagacaaagcgcgtcagcctcggagggtctcagaggtggctggctattattatacgccaagcaatgaaacgttggcgtggccctggtgtggaggctggacaacttcggcctgtcctgaaatcaaattcttctttgtaatttacaaagtggcgatgcagttctctgcacttctcgagcattattatggattcatatcctggccctaatccttgttttgactcgtttccccggcgatcattctgcggcagatccctagccgttttagcctgggatcctttatcatcttgaattatttattgacttggatctcattattgactttcgatcgtgggagaagaactgcacgagtcccttgggtgcaagggaagaccttatacaaaaatagatacgccccttgggttcggaagcaaccggtatgagatcgtgctgagcatcatatctcgatcgcgaatcgtcaatctcccaccgttagggttcattagggcctgctaatcctcgaacaatgagaatcacctcgctaacctcggcctagattgtgagatgcgaatgaggggagtattatggtcgagacattgctcctagctcttcgtgccctttctgaaacactccccttcataggtcggtcatctccactacctgttatccacaggctcccattggcctgtagatctatgaattggtcgtgaatccaaggaaagcacctaacctttcagtgccacgagaattgccgtcccaaatttgtccggtggttcatctattttgggaacactgatatggacgacagcggatggcttcagtgtgccatatttctgcgcggctttgccccatcgcggttgatgttcattatggcccgtgccacaaaggaattatgatagtgtcctcggattatcatgttgtgtcgcttggtccagatcatgacgtggtgctcaaagtataagatcagcaacgacattgtccgggaatattgtaatgctccaatcgacgggctgctcaacacttattggtcggctatcatatatccctcgatatctctggtggctgtactatgtgcttgcagcggccagtgaggcgcagtaaatggcagataggctacagccgtggaggggggtgagaatgtgagaatcttggcgaatcttcacctaagaaggcttaagtcttttctaagtcccagtgacacttccttatcatcattttgaaatgaccattgttccttctgttatatataacagagacaattcaggatatcccgtgatcaatggaagagccgtcttactctcacagtgataaggtgtgggaaacgattgtcaggccctaacttctaatgttacgcaaagtgtgactgtagaagcttttggggaagataataaggttcattctctagctacagacatgctcgagaggcccacgtgaccgtatagtcccagtctagcccaattaggcctagtctatatttattctgccggttatattattctgccaaagttagccgatgacatctcaccgcattgaaacccatggccataggggttgaggccgatttaggcttctcttggtctccgtctgaatcgtgttcgatggcaaatgttctgctatatgagcgcagcgtgaaagtctttggagactggggagtgtagctcccatctgaaatattgagtaatcacagagatgttttaccatgttttaccatgttttggaatttctctttcaggttgtttacagatgtgagcccaggggatgctcttgaaaatcctcgttcttttcccagactccaataccctcgcttaagttaaaaccacaccttgagaaatctgtttactgcgaggctagctttctttccttctcactagaagactggatacaaatttcatacgcccaccacggcctctcaaaacttgataaacttatcttgcttttgtaggagaaaaggccacagattagtctcgttttgctaatatctcacgggctccacgatatattacaagacgtggctgagcgcaatgcaggaactgttgaatgtgagcatcaagagatatatgaagtattacacctttatagttgcctctgacctacactataatgccttagtcctagataaccgggtgagtagagctctccttctaaatgagataggcgaggaaaacgccagcaaggacatccttcagactctccttggcggactccactgagtctgtggatatactggcattgctgagtcactggaccaacttcaacctagtcataaaaagcaaaaaagtgggtagcgggatgttaaaaacttaaatgatagagaggatcaaaattgactatatgattggtggaaggtgtataagaagcaagaccctcaggtggttgctgctgccagaggtttctagtaatcctagcgtagaagtatcagttgagagactattcaacacaggaagagatgtgcttggtctacgtcgattcaccataaaggagagacgttgaggatattgacgatgctagattttgttttgctgagcgaagcgaggcaagataatatatcttacgaaatgtctcgataactcagctcacacgagaacggatttctagccaaaattcaaaattccttttgcacgttggtaagcatagatgcgaggagtttgcagtgcctggcccatctgggtaacataccataggacttgacagttggacttgagcattggatctcagtatttggtgaacaagtacattgaatatcactccactccacccagcccgtgttggatatccaccataccggcgacttctaacgatttatcacctagcaatgggccaacgtcaatgaaacctgcagtctcattggatgcacgaattgagtttgtgacatcgagtgacttcccattattgtcagctgtagaatagagaggtccctaggctgacaaaacgccccattcccccgcccccccgatttgtgtactagtagtcagtagccacttgccgcgattatctaagactcagcaggatacctaactaactagttaggtagatctcggcgcttctccgaacagttacactcattttacctcttgggccaatattctactgtccgtaccatagaaaacagtcctcactttgttcatcaccttatctctccgaatatttatcttaatctgctcaaataagccacaaggctcaaggttatcgtagcattacttcaatgggtatcttcattcctcgggcataaagattgcgataccatggcgtacgtaggtctaccagacccatcgttacaatatatccacttcaaatggacgatttggcgggatcgggatctcgggatccaaatattttgcgggaaagagatcgacgcgcggaacaaccccgttcggaaagacatcagcaagtacaatagcccatgcgccttgttctgtaccagcggggaacacgccttctcgaattgttgttcatcggcgggctagaatactgtattcaaaatctcaatttggaaggtgcagccccagcctatttgccattgccgcaaacctgcttttcggttttcttctttgatactgacttgctcacacagctatacatattacgtacggcctataagcaaaagttcaagaaaggaaagttgagcgtgaataatcctttcccatatgtaagacaggtgtcgatcgatttgacgtgccagggttctctgggtacccggatccatctccgcccgtggagctagcccgtgtggatgaaatcccggggcgagcaattacccgttgaggtaatgtgagacttcaaatccacatcactgatcggccgacagagcttttgggaataaaataggctgtaaaagctggccttgacgaatttctggtgaggtgtatattattctgcccctgaaatcacgcatatgaatacgggaacgagcatttacctgcccaagcaatactccatacaagccttccgattacattgctgatggttgtataaaatagaaaacaagtcaaaagtggaaacgataatcagagccaacgcaagatttagatacaggtgacctttgaatgggaaacatgacaccgaaatcaattattatttgatggttctgggtatacaacatagtctttagtcatatcacccgattttacgtgaagctatcagaacgggtgccggtggctgctgtggtgcgaatgcgctacgggaatgcaagccaagggtgacttcagtgcttcacgtattggaatgtattatattgtaccgtttcagagaaaggatgcgcccagtttctgcaaatcctccatgtggcgtggtatagctgatgtctaatccgacgacccagccagccctgaaagcttggcgcttattgctgaaagcttggcgcttattgctgaaagcttggcgcttattgcttaaagcttggcgcttattttgctggccacgccggatgagaaaccccacaccaacaatgagaccatttgatcgagatgcatcactagactagggagacagctcgctggagtttggctatggcatattatttcgaatcggttctgtcttgactaattgcgctacaacgtatcttgctccagagggcaatgccggaaagtacgaagtctagatacgtaggatcaagctttgatggcttcattgggagcacgtggaaatgaatgcgacgtaacaatgtactcaatagcttcttcattgcacatgaagtcggtctacgaatctggttagagtgcattcaagttgactctgcggcaggatagttgacagaaatattgagttaaacgcttatacaccttgactcaaaaaggaaaatggtgaatttactttttgaaattaatggaatggcggagtaagccgctactgggcaaatttgacttcaatatgtctcaagacatttcggaatttcttggtatcttctccgtctctgggtcggcttcgagatataaaaggcgacatatgtcccagtgaaatgcgaacatatccaaccagacatcttctcatctcccattccaattgtcttacagccatcttccaaatcaggtaagtgagccttgctttccacttttatgagatgttcgacattcttacttgatgttcctagcaggcagccatgttcatcaaaccactgtcaggtattgcgctgcttctgcatgctgcagcacttacctccgcggaatttattgtcaaaattggatattttgggggtcttgttccaggccttcctagcaccgaacctggtgttggatgtgggctttatatgacaggaatcgccgaggggcaggcactttcggtcgactttcttccggaccatcaacccacggatgactgccctgcggctgatttggtactcttttgttcgagatggggatgtccgtttgagacaacatttgaacatcttgtcgaggtcactgtcttatcggacgattccagcgacaaatcgattaccgtgacagggcttgctcttagtggtaggagtgccacggttaagtgcccatggacaccagtgactatcggtagccaaggaggcctcggtctataccaggagtgggtatgcgacctgagtgcgacccaaggatgaagagcaggtggttaagattggcagttggggttgctcaaaaccagctgacgggcaactgaagttttgtttcgtgcctgcgagcctatgttgactgttcaatcaaagtgatgagccaggtggaaaccaaatgtctgtatatctttgtatcggattttgggttacgtgtggacctgatcgtcatgaccgccgggttttgtttgtgccagtgtgactgtctcgtctggcaaatggggatgctctcaacagtctttctctgtttcatttcagcgggtcagttacttcttccatttctataagccacagtatgtatgtacaaatggcttcacctaccctagttctagatcttgagcgcagatggtgtcttctttgaataaattgtcttttgactctgcaggctggtttttatacagacaaggattatcaagcttaacaaaacaagatagaaccccaatgcgtaggctccggcaaagcgcgagggccgacccgctcggaggctaccagtcattaccgggaccgggtaacctggtgaccttggcgacctggcgacctggcgaaccccttattcgtcgggactgacagctagaatttccagcaaaaactcaaaagcatcgattagtcaaattgaagtgtgatgatgattcctgacttggcccttgaccattgtcgtacagccacctttgatagaccgctacttatacatggtggcgaaggtctgaggcacaacattacttgaaaaagaataatccctagcggtgcttagatctcgcttattcacaaatatcaggactaaatcaacccaagtgcagtgccttggttaatataacgttcgtcggatggttttggtaaacacgtggatgctagttgtctcatttgctgcttttggatattgctagacgatgacatgtgatttggaaatggggggttgacttcgcataagttatctagatagataccaacattgtagaaagaaaaaacatcaagctgaagcaatccgtgtaataatgttcaaactccgaggcatggggcgtggttctttcagaacttgggtgctggaaaaaccatgaacttcagtaacatattaattgcgatcgtctcgtggccgtacaggaatatcaaatggtcgtgctggccaataaaatcaaggcgtaaatgacctcacgcatcccccttgaccgaactgagcgaggatatcgcaagtcggtctccttgaaggtcaagtattcggcctcttgatccctgaatcaataggattttacataatggttaactcgaagttgttccccgcataaagagactaagctgaataggtggtaattgaatcacctgaaaactcagcatgatcgcgccgtcccgcagttgcttagatcgacatcggtatatactgttgttgatatcgacacgctgcttgttgtggacgatgatcgatatgtccgcttaaatcagatatccggaccaatggggtccaagctacctcctccgacaaagttgaggtcatcgccacgttgcatcacagggtcttgtcaccctgccctacctggggccatgagattggcatgaattcaacaaagaagttgagcgataatatatatataatgcgaccctgttgcaaactgaaacttcggtaacaccttcaaaccccttggcagccttgtggatcttgatacggctctcctattggacttttacgccactcatttaagatctcagtccacctgaactctcaaacccctcgagacactgatatcgcgcaaaatggcaacattgaactttgatttgaaaaacagcactggttctaacacggtctacgcctatattacaggccaggcgcttgataataacaatgcgcttttcctcttgcgatctgatggtaaaaccgcctactatccgacctcaccatcggccactggggccgctctgagcgaggattgtgcgattccgttgggtgcgtctggcaataccatcaccattactatcccgcaccttgcaggcgcccgactgtggtttgcgcaagacaacaaattgacattctttctgaatcctggccctgcccttgttgagccttcggtatccaacccatcggacgctaactacaatctgatgtggtccttttgcgaattcacctggaatgactatcagctttatgcaaatctcagctacgtcgacttcgtgtcgatgcctatcgctatgactctaaccaacggatctggtgtagaccagaccgtcaagggtctgccagccaatggccttgatctagtctgcaatgctctcaaagaacagaacaccaaggatagtgccggctgggatcagctcatcatccagcacaacggtgtcaatttgcgggcggtttcgccaaacacgggaagagccctcaataattctttgttcgacaattactacgggagctacgtggatcaagtctggtcttactacggaaacaatactttgacagtcaacacgcaagctgccgccggtgatgtcaccgccaaggttgcctctgatctcttgtccttctcagttgcaggtatttcctacaccaagccgtctaccggagacatcttcagcaacagcagtggatcctttgctgtttctgggaatagcaccaaagatgccgttaccgctcgtcttgcagctgcgttcaaccgctcaactttgttgataaatagcgaccagccgaacggggagtcggtttcaaactactacaaaaaccctgtgacgaaccactacgcccgcatctgtcattctgtaaacattgatacccgaggctatgcgttcccctatgatgatgttgcgcctaacgatggcgccgatcagtctggcagtgtttttgatggcaatccaaagctcctgacggtcaccattggcggcggctctagtaattctgtcaagcagtctgccgttgaggacaatgctacgccaatccagcgacctgtggagaatggacaaagcaaggagagtggaaggaagccgagccgcttccatgagctgaggagctttgtgaataagctgtcgcacaggaagagcaaaacctgagaaacataggcttgtctcagcgctatatgattatgctgtcgtatattgtaaatgctaacgtatatatgtgaccttcggtcgtcattctgtcttttgaattcgttggaaataggagaatatgattctatcccttgcaacatacaagagagtaaggtgcctgcaaattgatgacctgcatcgttgtaacagttccctctgcttattccctagcatgctttttaatgtaagcaaccacctgatccggcatagccaaccagggcgtgtgtccggcattaattttctcggtttcaatttgtgcccccttccgtcgtgcccgctccaccaacacctgctgaaccggcaacggaatcgcgcgatcatcctcggtcagaagatatgtagaggggatgttcatatacgctgcaccagtagcgggcgcgttcttagtcgcccaagaatgtggcttcagaagcttgacccactccgcaccatcaggaacatcatggaaaaacagcacgagtggatcgctggcagtcacagttcccttctcttcctggaataaatgtcagtggtcacatagaaagtttgcaaatagaagtcggacaacttacatcgcgcacataccacggcgggggcatcccaccaaacgcgccgatcaaactctcgccaatgctgggcaggaaagcggcaatgaagatgagtttcacgacgccgcccttctggccggctgcttcgcgctctgacctgctcagcccatctaacgcgctgctcactggtaacccggcccagctgtgcgtgacgatgacgatgtcatggccagcatctgcctcctgttgagtgatagatctcacggcctcgatatctgactgaaggtcgacaacagagctggcttgctggatggagggaaatgcgatactgtggcagctatagtcggcgaggtccttgatgattgggtcgaagatggtgggcgggcaccatgcgcccgccgcgaaaatcagagttgtctttgacattgtcgccccggttaatgtgaaagctatatgaattggatacgggcgcttgctctgtgaaatgcaagcttgtaaggctgagaggttgcagtggtcatggaagcgaccatgcgggacttcattttcactttaattttaccgcttttctctcccgtctgaattaatatctcatccacatcgatgatttccattacactcttggttattcatagcagtgacatctttacgtggtgtcgcgggttactcgggtatacacgatgacgcaaattacaatgatattggccagtacaggaaccagtgaaaggaaatagacaatgtgtacggagtatcgagaccaagtctcaaaggaacaacattttgaaacaatttaacccacttcctcggggtcactgagcaaggcatgcaacttgccaccatccatttttgccagagcctggtacggtccatcctctacgacagctccctggtcaagaacaacgacatggttcgcgatctcgatcatttccttcgagtgcgtgataatgataacagtaagcccttgacgcacggccactaactgctgcactgtttgccggacgatctctgcacccgctggatccaagctggacgtggcttcatcgagaatcaagatttgaggttgacgcaagagagcccgtgcaatgaccacacgctgtttctgaccacccgaaaggccaaccccgccatctccgatcacagtattatatccacgaggcagagaggagatgaaatcatcaattcctgctccttcagcggcagctcggacactatgagatgaggctagaggtgagtgctgatctagcccgtaactgatattttcatgaatagtgccggggaaaatggttggttgttgcgatacgatggagatctgtgagcggagagtagggacatgcagccgaaggatgtccgcgccgccgagtgtcactgtaggctgtcccatttcggaggccggagcttcgtagagcgataatagcagcgacgcgattgtggattttcccgatccggatcgtcctacgagcgctgtgcatgagttgcgtgggatggtaatcgagacattctttaacaccgatgtgtttggccgagagggataacggaaattcaggttggtgagcttgattggggtgagctctgaaacaatcaaactaccgaggtgctcgtgggatccatcttgtgagagtttcgcaaggcgaatgagctgtgtcgctacctcacgggatgtgttgatttggggaactatcaaggcgtgagttgagtgcttcgaagtgtttcggggcctacttactccatgagagaatctgagcagcgtatccaatgctgaaaagtagcatcgagaataccatcatcacatcgttcacactgaactctcgggatgctgcgagaaccgctccataatagaatatcaaagctattcaagagagttagaacaatggcaaacaataaataatcagcgagcttacctgtagaaaaaatgactgttgattccaccataccgaaaagcatgcctgtatagatagcacgtttcagccccagcaacaagcaccgtgcggtcgcatgagcttgtttgcgatggaagtgaccttctaaggtcaatgtcctcacggtacggatctctgaaaaggtctccgtaaagacatcggcggcgatactgttcgcgtcattgcatcgtctttcccatagcccatttgttccctcgaagcctcgagtgatgatataaatgacaggtccacaggaaagagcaacaagtgtcaacttccagcaaacaatcaagctccagataactgccatggcggtgattgctgctgcaacgatcacaaaaccggcaaatcggccaagcaggtttcgcatgtcttcgccattttgatcgagggacgatgtgagtctgagagatccgttaccatctttctcaaaccaggcgcgtggttgatcgagaatgcgttcaaaggcatttttcctaaatgaatccatccaagcctcgccgcaaagttctaggaagtaatgcatgaaaaaggacgcaaggccatcgccgaaagacactcctaagacagcaagcgaccatgtcatggttaggtgttcgctgttatttccagcatagaaggttccaaacagctgcgacaggcaatatgagaacaacggagttgcgcttgcgtgggccagtgctgcggcgaatcctaggaagaggatgattcgctgtctgatcgtcaaggtcgaaggaatggtgcccataattcgagagagcggagtcattcgttctttcagtatcttctgctcttttgacttcttgcggcggccatgagatctccggctgcgcttcgcctctgatggatttttcgcggtgtattcattgagccatggagacttcaggctctgatcatcaatgtgaaccatttcgacttcttccgtgggaatttgaatggctatttctttcgagtcccattggggatcaggtccttccgtcgtgaaagaaagacgttggctccaatcttgcaagagcgatccggggaactgttcgttcctgactacatattcctccttcctccttgaggttaagtccagtgagcctgagcgaaaggtcgggggtatgtggccttgaacccaggatgtcctagctcgatgatgtccgagaaacgctgttggaggtctgaatgtatccaagctttccgacgatgagctctcccatggtaagtccatatcatccagagctctttcattcttggtttcaagatggccgtcgactttcgtatggaagtacttctcactctccggactgacctcgacagcgtatctgtaaccggatttcacaatcgaaccctgttcgagaatgtacaggaaatcttgttccataatttgtgacatctcgtgagtgatgatgatggttgtctttcctttccgccactcacggattgccttcattattgcgactcggttggcatgatcgagagcgctggtgggctcgtccaggatcagaattggggtgtcgcgtaatttcgctctggcaattgcaactcgctgtctttggccaccgctcaaaaagcttccaccggggccaacgcatgtgttgattcccttggggagaccattgattgtgctctcaagcatggccaactcaatgggatctttgacatcttgcttagtgacgctttcatgatcctggcgaccgaaggcgatgttcgtgagcacagactcattgaagagaacgcttttttgctctaaaagagtgatattgttgcgaatccagttgatgtcgagtctttggattggattgcggtcaatcaagatttcacccgaggttggcaagtagaaccgcatcagcagttggctgagggtgcttttaccagagccgcttttccctataacaaacgtcgtttctccagcggggaagaaaaagcttgacggtttgagaacgcattgatcgggttgactaggatatgaaaatgataccttcatgaatgttcgttagtgtccatttaaaacccagagaagagttcatactcacgtttttcacctcaatatcaccttcacagtgttccggataccgagttccctttacctcgctgacaatcttgtcttctctccggctctgtattatcgatctcaaggcgacaccagcgacccttcccttttccatcacgatcatctgtggcaacacctgctcgatggattgagctgcggtcagacaggcccagaaagttctgagaacttctccggatgtgagtttcccggcgcgtgcaagggaactgccataccaaaatccctgaacaaacatcccaaacatcatccatcggatgatagcaatttgcagagaattcagccgagcctgtcgaaggtaatgtgtggcagaactctcaatgcgctcagcaaaattccgatgctcgaacgcctgcccattaaggcatttgactgtatcgatattggtgatagcgttgttagcaaccttggaagcctccgtaagctcagcctgctgtgccgtaatgctgaacttcattttggaagacagatatacaataattgccgagaatatgggaatgcccgcaagagttaccagagagaggctccatgatgtgtagaagcccagccccagtgaagccagcgaacggcatgagtattgcaggacaagtccgagtggctgcgatgtcgccatctgcatttcatggatgtgtctaaaattaatattagatataatattttcaacgagtattgtcgcaaactcacgcttgaatccccgataacaaagccccggagccctcacttttggcctcaaaccactcaacgtcgcgctttagcaactcttgaaatacttggctgcgaacaatggaggcctgcatttccccgaatgcaacgaacagggcatagtatgcaccgttcaagaaccaaccagctatccccagcgcaatcattccaaagcaatttgtgatcactttgccatggagctcttcagcatcagtctgaccggctccgaaagatgtgaacgagtcaaacacattgccaaggaaaattgcaagtcctggcgtaacacaactggcaaccacggcgaagatagatccggatatcagagtcggcaggtgtcttcgagtcgtgaatccgaacagtgatttccagcccggattgcgctcggggatattttctttgttagtgtcgttatgatctgaagtcttgcgttcgggcaacattttggcgacaggctcgaacggcacgttgaaggcctagtatgacttgtggagatagtccttgtcgcgctgtagtggcatagcagtgaggtaagatggaagaggatacagatcgacatgaaatggccatgatgggctatttgagtgtgaacccagatacataatccaagagaaagaacaatacttagaaattcccaaatgcggcaatattgaggaggggtgcagaacaaagacacccatgctctggcattgttacgaggcacctgagatgaatgtaccattcatcgacttcaaccttgagacagcaatcatacattgccttcacggttggtagcaaatctctaacagtcaaggaaacatagggctagataacttactcaatgtttgatgcacgatgaccactatcacccgcaatgattgctctatttcgaatcagatagtggctcagaagatagacagaggaccaatggaaatgtcaatttatttagggtatatttcggaccaaatgttgaaagactgtcgaagtcctagcggacatccaatttacatttgagtcgcgattaatggtccgatgctaaatcagaaccacatatttatgggtatgaccacgcttctatcgtaacaatattaacctcaagacatgatactgcaagatcatgtaatcagcattacaagtctcgaggccattcatcatctgcgccacaaggaaacaggcaaaggccgtcggccagatcagcccggacggatgaggaactgtcctcgatttgtaggacagcagcaatgagacacgatttgtaatcaggagctagccttctgggccttctcgtaaacccaatcgttcaggccggcgcggtttctagaagactccatcagtttctatgcatgattcactaagctccaatcagcacttaccgagcgatttcgatagcgtagaactgcatgcgcacaccgaaaatggtggtattttggtcgtactcgacatccgcacgggtacggatcatggtgccaaagttgtagtcctcgatctggtcccacttcatcatccaggtgcgccacttctccttgccctctttgctcttcatctcgtcttcgacaagagttgcggcgggatcaaaatcgggaaatgcctctttgaatgagtcgtaaatatcatcatcctgcttggtcaagtgaagcgtcgagcccttgaccttctccagaatagaccagtatgtcatgagatgttcaaccgctgtaatgtgaaagaatattaatattataacttttaaaaaagctgtgagtgagatgtaaatcaatgcgtggctgacctttgacggcgaactgcttctccatctgttgcgattgtcagcgatcaagattcatcggtctttagtatggacgtggggtcgtacatcctccaaattctccgcctcctcggggtcgaatggtttcgccatagtggtagttgtaatagtaatgctttgagatacaaagaaagtagtaaaggcagtgatatgagaaatggaaaggaagtcaagttggagtgttcggtgccccgcgcatagttttttgacgggcggagagcagcctccgcctacacccatggcctgatcgttgacgtcattccgcccgcagcccacgggtataaacgtcatgttcggctcaattaggtatacctagtataacttgctgttgcatgatgttaggggttttacatgtaaaacttcgccgttctttgtgcattcgaattctgcaagaagcatagaactttcctatgtataaccaaggagaaggacaagtttaaccccacatagaccctgaattaacgccagcatcgctacagagttactatagggtatagtcatagaatgtgcatgcagtgaatcacagctcaaaagcattgcttccaaatgagtcttcaaaaggtaatgctcagtcactatcagcatcatccggtagttcttcgaatcttccctcgtggagagcctgagtcaccgggttctcgacattaaggagaccatttgctttggccctgcgataaataattgttagcaatggctctagatagctcgtttacgatgcacctacctctcaaacaacacaaagagtctctccgcctcgcgctccttctcctccatggtcataggtggaccggtgtcctgtcgctcagcggcccaccgttgtccagtgattggattgcgtgcggtttcagggtcctctgtagctgaatatgcctcgcgtgcactttgtggcatctcaatgccgcgcgctgccaggaacccagcagcgaagccgtagccaatattcttggtgagtttctcggaatccttatctgatagaacaaacatcagttccgaaattgtaactttcagattggtaaagtggcctgtcgagagtttcagcagtctcgaagaaagtgtttcagactgcccaattggcaagcttcggtcagtgtcctcgggcagaagaagcgactgcatatgcttgcggggttcattgggtgccacttcgtggatagcgatgagtgaatatagcaaggggactgcgttttcctctagctccttcgggctatatatggatgtggcctgatccaagatgctgatcagcttgtccatgttgcagttgttgtcaaatgccgggaaaagggggctgctctcgaaggctttgcctttcttttcctccaagtcaaggatagacaatgtgttgagcaagccgccaactaaaccatcaaggggttttgctgggatatcaatacgacatataatcttcaaaatatgagggatggaaggggagaactcggcagcaagatccggaaatatcttggagatgttgtaaatcaatttcagagtgtccgttaatgccagttcgtccatttgtgacaatggttttcttcctgacttggggaactgctttgcatgacggctcaattgctatactagtcagtacagcaaatcaactttcgagtctgtcgatccactaacgtagttgatattttcccccaaggcgtgacttttgatcaagtctttaaagtctagtgtggtgttgtaggtcgcgtagaacaatatgcggcttgtaaccatctcgtcttccgagtcttcggtctatcaaacattagtgtcagctttcgtaccaacaatttacctgctgtagccataccttgagcttttctgctagttttccgccgtatcccgtgtcgacaaaagcctggcgcattttggggtccagtaatagcgcatttgcaacacatcgcaatgccgctcggcgtacttcaggagtctccccctcaacgccataccgcaccaatgtattaatgccctgaaaatgatcagaatccattgtaattctcattttcgacgggcaacttcatctgttgtgctcatacattctgtgaatagatcggttctgcgttggtagggttcgtgccatgttgtcggagctgaaggagggtttgaactcggtctagtagtagatggtatcggtattaggcacgtaaaatggctatcgcagcggactgacctgctgttgagaggttgttctcttgtaggtctttctcaagagactgtagaagctgtgtcacttgttgtagcttcgctgtatgtgcaagctcaagtcagtcaatctactggagattagaaagttccgcgacggacctgttccttgcatctgaagggacgacatgttgatcttagctcggactaagtcgagtgttccgagtacaggggtgatgtaggactgatgtcacttccacctatgccttgagctgagatagaatttctggcacagtattagagtaagatttgatcagatcagtagcttgagcaggtagggcacctacatgtaggtatgcacaagagaataaaaagaaaggagagggaggcgcgcgggaaagtcaggcgcgaatcgtcataaattattcggccaccccccctttaagcttcccttaactgtagcaatctatataacaatgtattcctacataattatgagaaatgccctatcttgcaccacttgattccagatattttgtataatgctttttcgaacttttccgaactccgctggttgcctgaagaatgtggcagtaatatattgaagtcagacatttcatgctaaattttgaccgctgaacactgatcgttgttgctgattactacatactcacacactgaaatactctccaatgcctttgaagctatagtcaatcgcatgagagagtccacgtatggatgcctcgtcgcctcaggcggcgacactttacgcgcatcgcggcgcgtcggaacttgaacttagttttctcagcttgatgtggcttcttgattcttcagtctgaaacagatcatggacagggcctgaacagcatcttattcagcaatgatccttgactattggctcttttcccctttcacacttcttgtccgattcaaatcatggtggagatcctccctgctcgtccgcccacacccccaaggacaacttcgcgcattgtgattgaaaacgccgagtcaccaccagccgttcaaacacccaatgagtcaccattttccgcgttagggtcggtgcaggttggtccatccagccgcagttcgaagaaagtgaatttctctccatggcccaagtacatcaaaccaccaacatttgctagtgccatgaaatcggcccccgacttcaagactatccctccgtctccgaactccaagcctacgaagtcgatcttgaaagcaacccagtcgccaattcccgtttggtcacccaacgtcgatacattcaccgccgaatcgcttgccatgctgctcgaatcagtaatccaacagctggctggcgagtcgatgagctcccgactcgacgcctacatgcaattttatggtgcgctacgcacttataacgggcttccagcgggtcagaagattgccgaaaaattgaatctcatcaccgagtttattcagcgagatgtgaatcgggactttgcgaacggctcccttctcgacacaaaccttgccaatcaagctctgaaattgtcaatctcgtttgtttggaatccggagatttcgacccagctttcggaagagttcaaaatctttctggtcgaccattccatcacttgtctccatgaggccaaggccccaaagtccgttttgatacactacatgtccatattgtctaatcagagctttggacccaagattatgaccggtgctcgtgtagcccgccttttgacagtactacaagacataaataagaacatcagtggcaactcaattgtttctcatcgattgaacatttaccagcggctgctgggccaagccaaatccgctttcatctcccaagcaagcctgtggatggaaaacttgatattcgggctgcttcatactttgaaggatactaggtcaaaatcgatttcatttggcttccaggtggcgacagacgccggtccaaatcctatactgtcgaaaaacatccgggatctctttgaccggccattagagcatgaccgaaagcttgtgtccgagattcgtgagcgcatgactcgaatgatggcgacggatagcggtgagcatgttcctcaaatttggagcatcattatccttcttctccggagcaaaagatggaattttgagcaatgggaacattacaaggaatgggttctcgtactccaaaaatgcttcaattgcagcgagccagtgatcaaagcgcaggctatcgttggttggaatcgatttgtctttgctgtcagccccaacgaatcaacgagccgatctctcctaaaaatgctgggcaaaccggtactctctcaattcgaccgtaagaaggccgacaagtcaggagcaccgcccactcaacttgctctgacaagctactacaatctgttatactacacgtttcgcccttcagcttcttatcagcacctggatattatatgggaggaatacgtggccattccgtctgcaggcatcttctcatcagccccggttctcagtgactgtcttgcgcgcatattggcaaacctgctgtggagtacgcaggctaagatatgggtagagaatcgaatcaatgatactaccaaaatggaggcggaggaacttcctgcagccgacagcagatgggtccgatcaagaattacctcgattctaaaggtttttgagcatatatttaaagcctcggtctgggttgatggcgcggttggccaatctcatgtggcattggcctggagtagtctatccagtgctctatcgattgcgtccagcaaagagatcaccccttcgggggaatcaatgcaagctgttgccagcgtttggagtctaatgcaccgcctttggaatgcagggtcgccctcattgaatgccggcaccacggatgagttcttcgaaagattcagattcttgtctacaacaatgattgtttcgattgggggtattccgtttaccgaaaagcttctcttgagaaatgcggatgagactgagagcatttccatacattcacctcctaatacgacccaagaaagtgctattcttcacctccttcgaataatcagcagcactgcggggacaatggtgccaagccaatcttataaactccttgtcttatgtaatattgaagcagcatgcaacgggagattctcccgaggaactcgcctcgaacttctccaacagtgtgcagaattgagcacttcgaaggccagtgctattccacgagcagctcagctttcggaggtggtttggaatgccactgcccaggtggccgcagattctttgcagtcgttccccatggaatccgctcgtgggcgcgacgggtctgtatctcgtgactacgaaaatgtcattaagattctctccctcggactttcgtttccatcggctttcgaagggtggtctcatttacttgaaacctttgttcgcgtggttcgaacagagaaagggaaccaagcggttgccactatgattgtggaacccatggccgagcgcctcatgtatctttgcgctggagatacttacctaccctcgacttcactgcttggtcattccttatctatccctttcatgcaaggaactgggctagggattgatcgcagcggcatccaggcagctggacatgtcatctttcctcataaacttatcgcgtcgactgcgcagacattacatgatgcatatcacaatttcaacgcatcacaatcccacggtcttgccgacttcatcgaggcattgacttctttcctggggatcggtgttccgcagttccaatcacaaattcttcaaaatctccagtcatcccttggtctctggttgaaggacgaatcttacaaaattcacgttgaccacggcgttgacagcagaattctgacagcgtgccgtgcgctatcgtcagctactatcaatattctccaaaaatcagtttcccatgatctagcttctttgaaaatcttcgagccgattatttgcgccggtttggagtcttcgcacatgtcaatagccaagagatatgtcgaactttggggcttgacctttggctcacagtctttagccactccagtcaccattttacaagctgtacaaactgctagctcgaggttgcagaccgcaacattgcctccgcaagacggtgatcaggataccgagatgtcacctccatctccgcaagacaagatgaatcggtcattgcatcagccgtctcaggacactcagctttcgtcccccgtcatacggaccgaagactcctcggtggccatcaagccaactgagcagttccatgaaccccagttaccgagtaaccttcatcagcccacggatgcgcaaattattgatggtgtttcagtgtctcacaagcgcaagagccgtagtgaaatgttttcgatgattgaatccattcaatcttcgtcgcctgctagtacgccgcggaaattgggcttcgatactcctccgcatctgcccaaactacatggagaatcaaagaccgaacttcctctaacgcccactctcgcccctactgagaatgaagaaggattcatcggctcttctcctactcctggaaccagagacccaacgcctgctatgaactccgacgcactcacatcgggccatctacttgcggatttgggtatggaccctccatcttctcctccagatatgcaatctcggagtccaagccctcggaagagtcgctcgaaaagtgcgcggcgaaaggctgcaaaggcaagaaaggctcttgtcggtatctccggcaaacagtcaacggtcaacagcccggctacttcccatcttgcaacggaaaatatagatacacctatggggaatgcctatgactatgataacgaaaacgccgacactgcacctcgagtaaatggaatgactcccagccggcaacttcgatctgcgctaggtaaaaacccggatacagaagaaccttctgcggtgccactagttgattctgataagacacctgtccaacaacctactcgcagaagtaaatcaagctcgggctctaagaaaaaacgaaagcaatctcagtctaagcctgcagatgatcgacctcaggaagccgcagacatgccttctgttatccctccggatggtttcatggactcgagtgaggagacagagacacaagtcgcatcacagcttggacaagacttggaactagcattggatatggaggacagaggtcatctggagcgaacaaaacttccggacgagccatccaggaagaagagaaagcggaatcaaatggaatcatccccaactatgagaactgacaggcgccggtcttcaaggctgtccacagttaaagatgtggtcagtgtcgagctattgcagcctgatgactcacattcgcaccatgtcatttctcagtcggcctctccagctccatcattatcaccaactgcaactcgccgatccacccgcagttcacaacgaaaatatgctgatgacgcttccacggattcagtccctgcaactcagagctccgttgtgcaggaatcaacacaagatgccgagaccccgcggccgtccaaaaggactcgtaaatccattcatcttgaggaccagtctgtgtctagcaccatcggtagcactcctcaaggcgtctctcgagatacccgctcccgcaagacacggcatcagcaggcgtctcaacctcaaccttcaagcattgcatccgaggaaaatggcgatactgaccgcttgccacctgatgtcagcctagaccggatccccgagagccttattacagaagaccaagcgggccagaatacctctcttgtttcgaccgaagaggcaactgccactcaagtctctgaaagggagcaagccattgagtttgcggtaaaactagatcccgaggaggacatcaacatgaatgccgtccagcaatctggtggaacagtcgagcaaactacaagtattgccacaacgggtactcaaacccaagaaacaccccctgaacccaaatccgacatcagcgaacaaggcatcgtccaatccctgaagaacctcttaggtgaaatgaaaatgacgaccttgtcaccgagcgctttccgcgaagtcgatgatctcctcttcaacctccgttgcgaggcacaaaatgcatcaacgcgacacaatacttcagcatagcgaatggcgtttacagcgaaaacctgttggatatgaatttttttacattggaccccgtctcatcattattccccacctgcatcctatatatctttataacttgaagcacatcccatattttattgtttggcacgcttgatcccaaattatttttcttgtacgttaagttttccgcgctccgagctttccaaacattgaacattatgatcttcgggaagaagtacaaggacaggtttctatggatatttagttcactcactcacttccatatatttccctcggccatctgctttcgctaacaatcaaaacactccattcatagatattagccagttggagtctgacccgaaaggttcaggtacagcttacttgaatgtcatggtgacgcataccgccactttcctaaatagtatatcaaaccagtcctgatcaatttggcaaaacaggaatcattcaaagcttccgcaatcatatgtacatactgacttgactatatttgtccaagccatggccaccccaggcactcagtatatgatgcaagcctgcctagcagccgatatgtcaagctcaccacaccccaagccggtggacccttatctcagcgacccggtcagcatgcttccacccggcctaacacccgactcgaacagccgaatcaccttgcgcggtgtgagtggcaaggatgtacttattccctgcctgagtatcggcgcatggtcatggggggataaagcaacctttgattacaacccaacaagagacctaccgcgcatccacgcagcatgggccaagctcaaggctgttgggttgaccttcgtggacacagcacaatcctacggcgacggtgagagcgagcggatctgtggaatattgttccgagacatgcctcgcgactctttcgttgtacagaccaaatggttatcaacaccagatataaccaacacagtcctgcagtctggcgggcccaagtctaagcttaaagattcgctcgtgcgtcttcaactagactatgtcgacatctatctcgtccaagggcctatacatcctagcaagatatccattgtcgctaagggcatggccggctgcgtgaaatccggaatggcgcgcgcggttggagtggctaactatgacacaaatgaaatgatcaagatggctgatgaattggccaagcacgatgtcccactctctgtctgccagtgcgagtactcagtagttcgtcgcttacctgaagtcagtggcttgattcgagaatgcaaaaacgcagtatttgctttcaagggttttcctcgctagccgagggccgtctttctgggaaatattcgaccttcaatgagccgcagcaaaggcggcgttttagcagttatcccatgcgtatgctggaacctactatcaatgttttaaagagtattgctgaagagcggcatgtgtctgttcctgctgtcgcgctaaattattctatcaataagggcgttctcccactggttggtgtgcgcgatgctggtcaagcggagcaggatatgcaggcgcttggatggcggctgacggaagatgagatcaaacagattgaaggagtcagtctacagggtagaaggtcctcctttatgcagcacgggtaggtattgaatatatgacaacattgcaaaaaggacctctgaatttccttggtcttactcttgtcgagggtctcctcccaatggctttcacgatgtctagaccgaagagctttgagctttcagttagaaatagaagagcagagtatgactctaattgcgtccttactaaacccactctacctatagtatatgtcgcaatcagctgccatgcaattgcgcaacttcatgccaagaaccgcgcccttggcaatcgaaggggtttcgactgtttatcagagatttcacctcatttggctgaaccctgcatccgcctatcatgaccatgagatgcctgcatgtcatctcatatgaccaagccaagctggctaatatttgcccgtaatattgatcccaccaacaataccacgacaaggcacaccatcagcgcactgggatgcttccaagactcttggcgtgactgtcccatcgcaccacccacgaatctaaagatctaggctgagaattcctccccaagcctcttggcatgggtccgaggtgacgggtgcagcaggatgagagggttggcaagcccttggcatcagtcggaagccatacgaaagcgtctctgatctgctacggaggtttctggtcgactttgttactttctttatcttctgtctcttgcaaacagcgtggttctcaccacatgaagttttaaagatctcaaccgcctgacaccttcctcgtctaatcggtaccatcatggtactcgcccagtatctgaagaaggtcgtggcctggattgctcctcctccacaaaaatccgaagatggacgtgatcaatggccctctcgggcggctttcctgttggccgccatgggaggctgcgccggtcagggaaatctgctgcgatacccgtcggtagtctacaataactatgggctgcaatggtttatcccctacctattagctgtgttcgccattgccattccggcccttattctcgagattgcgattggacaagcctatcgtggcgggacgatgatcgcgttcaataatatcaaccatcgactgaaaggcgttggcatgggcccgattttggtcagttttgtcgtcgtgcaatactttacggtcaatttggcgtggatcatgaactatttccgcaactccttccggagcccattgccatgggagggcagaatcgaggaattttatatgggcgatgtcgtcgccaatgtcgatccagccgtgggtaatctcactgctggcaatggtgccgttgcccactataccgtgtaccccggcattgccctcatcggtgagacggtcggctggagcgcatttatttggtttctcatatggatctccatcttccgtggagtgggcctgacgggtcgcgtggtctactggacgatgggtctgccgattgtcaccaccattattatcgtcggtcgctcgtgttcactggaaaatgcgggcgagggtatccgactcttatgggcgacatggagaagcgatcaactagcctcgggcactgtctggcaaaccgccgtcggacaggtcttcttttccaccggcattggtttcggctatttcacttcatatgcctcctataattccaaacactccaatgctgtcatggacgcatttctcatctgcggaagtaacatcctattcgaaaactttgctgcctttgccgtgtttggtgtcatcggctacctccgacgttggccacaagatggcgagagattgggtgcattcgttgtcggcttcctgaccctccccgaggctgttcttcacatgcctggtgcgaattggtgggctatccttctattctttaccctggtggttctcggttttagttcggcctttgtgatgctcgacgcggtggccacgttagccgtggattcgggcatgaaaatgtcgcggccaatgattgtgactagtctcacgataatctcattccttatgagtttgccatactgcacgcaatttggattctacctgctggatggaatcgaccgatggattaacaatgtggcattgatctttgttgtctggtcggagcttgtcggtgcaaccacggtttatcgctggcacgacgtggtgagccagacagggctgcctgcttttgttgtgtataatttcggatactttggtggccagattgtcggagtcgccgtcgcacacggtatctcgaatccatcagctggtgctggcgccgggtttgggttgtatatcgtctgttcaattctttccgtcctcgtcgccacgaccccggctatcaaagccgccagtttctgggggcggaaccctcttctcgcccgattttggtatctagcattctactcggtatgtccccactgctaacaaatccagcaccaacggaaactaatatttgtagggtaatcaattgagacgcgacctgaacggtgtcgttggcggtaatggaaactggaacattcctcgtttctggcccattctactccggtacgtcagcgcgcctattctggccattgtgttcagcttcgcgtatcctgaattctataccttgcgatacgacccgatgatgatcgccgggtttattttggcgcacttctgtttgctcttaactctgctcggtgtggtatttccgcgatactacgatgtctttatcccaccgcaccggagggccgagggcaccgaaatcatgaccgccaatcagcctaaggaacacgactttgtgccagatgtcggggtgtttgactttgaatccggcatgccagagtcgatttcgggccggaagagttctgataagttagatagtgtacattcgactctgccgaagctataggctgtatatatcttgttcttgtcgttaaggtgaagatgagctggttatgatatgggtttttgctatttcaagtccttctccagcaaataccacgagcctcactagtacctagacggtcattagaaatgttagcctgcttgaaatcaaaaaaactcccaatgtcgaacattaaggtaccggaggccgtcaaaacaaaacaggcggggccgataagatccccaccccccgcgcttccacctgaaacgtcaagacatccaaagcatctctcttctccctttcgacacacactctctactttcgaaaatatggaccgatcaaacaaaccctcagcaattggagtgggagcttcccttccgcagcccaccttgtccatcaaggacaacatcattgaagcttcgctgcccactggtcagtcagtgacggtgcacctgtatggcgctactgtgacctcgtggaagacgggcggccaggagcagctgttcatcagtgagaaggctcatctggatggctccaagcctatccgaggtggcattccgctggtgttcccggtatgtgaacgctacaatttctcgatttgagctacagctaaccgccctgcttattctccaggtcttcggtcccccgccccagaaccacgctacctcatctctaccacaacatggcttcgctcgcaactctaactgggagttcttgggcaaatcctcttcggaagcgcccggaagggatagcgaccaaactgatctcactgtgaagttggatttcggcctgtcgcactcgatgctgaccgatgagttccgcgcggcatggccatatgagttcggtctagtgtacagtgttacactcaccacggactcactagagacggcactgcaggttcgcaacgagggccagcagaactttgagttccaggtgctgatgcacacgtatctgaacattgcggtatgataaatactccaggaccccctcgcccctctcattcccttgctaatggaattttacaaataggatatctccgacatccgtgtcaagggactcgaatccaagacctacatcgataagactctccaagcgacttctcacactgaatcgtcccccgcattggcaatcacccaagaaaccgatcgcatttaccaacaactggatccttccgctccaattgtggttgcatctgcgaaggatgaccaacctttgttctcgatcactcgggaagctttgactgatgttgtggtctggaacccatggattgagaaggccaaaggtatggccgatttcggcccagatgaggcttacaagaacatgatctgtgtggaggctggctcggtgtctggttggcagacacttgaagctggagaggcctgggaaggagggcaaagcattaagtcgcgactgtgaagatgagaggatattttgtctcccactattgatctctatgcatgatagttatgacctgaagacgcctattcccaatttcaaattgaagatccgctaatcgtgcggccatatttgatctctagcctcgccttgcttgactatagacagcacttttatacacaaatcccatccaaatttagttcaagatatagatacacatgctttgacgagattacatgtcatcaacacgcaacaacagtcccaattcgccccattttaattatttcagaatccatttctcgtccatcatggagcatttccatgctcaataccaacaggcgaaacacccacaagatcaataaaagatcggcggccctgcttgccctcttggaaagcagccaaccgctcagcagcctcaaagctatactgagggccattgtattggcgtctaccacggaacacccaccaggaggcagtgagggccatcaagccgacaacgatcacactggtatagttcatattttcaaccgtggccggcaacacgagggggaaacagaagaaaataacagtaaccaaaatatacatcaaagaaacaatgttaaccgccatcccaagtttctgtcccatataaaatggcccggggaccatatttccacgaccagacaaaacatgcggaaagatggccccaaagtaggacagcgagctcagcacaataaacgacgagatcagcgcttggaatgccgtcgtgctgccgatatatatacaccccagacaagtgacgagagcgctcatggcgactgtggcacgcacggggcagttcagtgtcgggtgcacttgggcgaaatagttcgaaaagggtgtcgcgttatcgcgtgcaagactccaccacatccgaccgcctgtcacgaatgtcccgatcagcgttgggaaggttgcgagaaacagtactgcaatcagaccgatggcacctgcgttagaccctgtcgcttgtcggtagatctcggcggttgggaaaaagccaatgttgcttgcaaagacagcgtctagatcttggatagagtaaaagagggcgatcaggtacacaaaggatgtgacgaaggctgtgagcatctgcaacattatgccttgaggaaccttgatctcgggtttggggactaaaacatgttagttggtgatttcctttccttttctcctgagtctgacgtaccctcttctgataaatggctaatgcagtctgggactccaaccgcaaatgcagcattcaacagaccagtcataaaacacaccccgtctgaccagccacccgtgttgttgtggtactcagtccacacttgggtattgctggcatgatctttcggcatcaccgtgagaaccacgatagttgtaacgaggccacacatcgacaagataagggaaaggcggttaatgacaggaatgaaacgatttcccaggcatacaatggcacagcacgcccaattgacaatctggaatacaataaatacttgccaggatttccacttcacattcgggtatttgagcagatacatggccacgccctcattccccaacatggaactcatcgatgatgctgacagcagccacgcgcaagcattcaggtacccagtaaagaaccccgctgtgcggccccgattccggctcaaaactgatgaccagtagtatactccaccggcagagggcatggaggaggcgagttcggccaaggaagctgagatggtcgtgtaaaaaatgctgactagaatcagtccgtatagaacagccattggaccgccattctggagcgcagcgacgattgtaccccctgttgaagcccaagaacttggtcctgttagtctgtcgaggttctatcagtgcaatttccggttctcaagggccttactttgcaatgacaatacccaagctggtcaaactccacatcccaaagttccgcggcagctcttgtttgtgtccaagtgcagattcaagccgtacttcatccattgcggcatggcctttcgggggcttttcagtgtccctagaggattgccatgagaacaccgccattttgtcgtaagtcgtgcgatgttagagcgaatatttaacaaagggattgaggcattgcagcaactaggtcgaggaaagggaaaaaggaggtgcatcaccccacttggtttgacagagcatacagggcgcacaggaacaatcaggtatgtcgcaacaggaaaccaagatgtgacgccaatgccctcatggctgccacatgtattacacgaggtccaagcttcaggcgagtagggttagtctctccgaaggaatgcatgtgttttctttgagaccctatatgaaatatggagctagagacgttattggcaatagtatcactatttttgttggaaaaggacccatactatacgtatctacggagtgcactacccaaatgtattacgatcttgcttttgattggacgagtacgaattgtttctcttgtgacctgcccgaatcggagctgagttgatacatcgcagactaagtaagggggattcgcggcgaatgcggagtttggggcgtcgatccgatgggcttggccacatacaatgtacggactactccgtagcttgaggcgaatttcatccagttggggtaaccctccaatattgtgtttcccaaattttagtaggtctgtcaaatatattctgcattccagcgttcttaggggtttgctgcgcgacattcaattagtctgcgccatgcacaagatcgcgatgtccgtgatagatcgaccacatggcctcgcatgattgatgatttgcattatgtataaatatatgaatacatagttatagagtgcagagctttctatgttgtatagggcttcgctgcttggatgaatagtacaaatcctcgtttcttcttttctaggagaatatatatattttcgactacgtgttgacttaagtcttctctatcggtatcatctgaatctaaaagagcctctaaatgacggaatcatccatttgagtagctcatttatagtgtccttgctaatacaataataaatcattatcccaccaactacggacagcccttttcagtagtttcacgcggatgatcaatactggacatgaccggcttcaacttcatcaacaatatacatactacggtgttgtagcaacgtaacagggctcgctggtagatcttttagcggttatgaatggtcttccggcgcgacctcttcattagcgacagacttcgcttcaatcggtgcttcgtttgccatgctagctagcggacatgaaaacataatgagtcaccaaattaagaagcgctcaattaccaaccgaaggatagaagttaaatagagctatggcattcaaaatcggccacatagtgacgcagtttttaaccgtggccctgaggttgtggacgttcttggccttggttaatgagatggccgtatcggaaaatccctggaaaccgagtaatcaaggacattccggtatagccaatgccataagagctagacatatagttatgtttgaaatatgcaaaatttctcacaccgacacgcttccaatcgaccgaactggactcactccgtacggagtatacttttgcactatgaatcactatttctgtaggatgggaacacagccgttctacggatcatattcaatcccttcctgctctaccagctctggactttcgttcatacggctagatttgccgagtttttcgagcagtagcaaccagtagcgcttgtatttattcgttattctagaacttccccgagtgctggaaaatactaaagataccgcagtccggaatacaaccgtacagagcatggtaagcatattcgtacttagaacaggacagatgtacaattgagcaaaggtgcaagttcccatgcactagttagcggcttttcagcttccaaaaccaaacctgcaaatcttaagatcatgaaaattgatcgggaaatagggttccatagggatgaaatgaaggaggttgaacattcatatcagacatgatcttcggtccacgactggcgtgccatgccagttcttattaaccctttctttagttcgcagatcgcgcaagtctattttatggagaatctttgtgtttaggaactattgaatctcgcttggatcgccatgcagatcagcgttccaaacttcccaataatatcagccgcaccgctcctacgtatccactattgggatatgatctgtcaacaagtttgtttatgtatgctcgaggcatggagatcacaaagctatcagcaacgcgcatagggggaactttacggcttgaaatattgaatggcgaccaaggatatgtcgttacaccaatctcgcttaacgcatcccattagagatattcgcgcacaactgcgtcgttctgcacaacactggacatttacagtgtcacgagctgaaccagcctcttcggtcggtggcaggaaggacccaggacacaaatgaggaatgtgaagcataaatcttcttctcccatatctattccatacttcgtgcctactttgtacattccaaagccgactgtcattggccagattggtgcttggagacaagtaaccccttgcgtttacgccccattcttccttgcttgtcagctagcactgacatctcatgggtcaggacgcatgacgccacagccctcggttggtagctttaattccatcttcgggacctaaggttagccactttcaccgactagatgaaatgatcgctctctcggcacagtagtttgctccgaatacataatttgacaatttacccaggctcccggtaaacaagtgatggcgccaattcaaacttgtcgctgatgcttctcatcagaacgcttcgataaattgccatttctcatatatggtagactcgttctatcgcgtcctgacaacttgagaactggttcagggagaaggtcgctctatccctcaagatgggtaacgagtcgcccactccaaaccagcttttcacagaagccatagtcttctggtctatagggcttgttatttatgtcgggagagtgtaggtttgagacgcaagtccggaattagagcaattgctaactgcagtgaagtgtggctcgcataattgccaatgggtcatataaacggttgtttggtaagactgctaatatcggtttgtttcgaattctgctaataagtaactccagtggacgactatgtgatggcagcaacatttgtaagtgttatcatcgccgattatgatggtcacttctttcgacttacccgacggctcctcaaaaggcaatatataccacactgctagtactgattcaaatatcggcccgctacgcaacgaacctcatggaccctaaagactacgacatggtgctagcagacccaaagcaagtcagcgatcggatttatggaagcaagattgtcattgggctggagcaatgcatgttgatctcaacctggggcgtcaagacatgcatgttgatgctctattggcgaatcacgcagaatctgaaatcgaacctctatatcaagatccttgccgtctacgttgccgtcggatttgtcgtcataatggtcacatattatgcagtttactgccggccgttctcacaatactgggccatgccggtggataacatgcagtgtgcgacataccagtactactcgataacccaagccgtcttcaatatttcctctgatgccgtcatgttcgccattccgattcccctccttatcaaagctcaactcaaacggcgcagaaaggttgtcctcatcggcgtcatgagtctgggcctgttcactatcattgctgccattctaaacaaatatttcaattttgcctctcctctcaccacaacgtaccaaatctggtacatccgtgaatctagcacggcaatatatgtcgctaacctcatgtgctggtggccactcctgcgcaagttgtttggtgtcaaggcattccagtacaacagcaaccgagcccagaaacatgggaagcccgacaaccagaacaatgatagtagcggctcctactccaacaactcacactctcatccttcatccaatttctctcgctcatggaagttaccttttcatcgaggaaataaaaacacaacgcccggcaagtacagcggtgccaagggcccgagtaccgaacccatcaacaggtccaatgccgagtttataaacgatatgcatcgtgtcgaagctgtccccctcgagaactggacgacaaagcatactcgaactgacacctcgataacccaagactcacgcaactcgctcgagaaacaatgtgatgttgaattgtaccagaagcagcatgcacgctcgctttgttaacatcataattttcctgcctgttcgaaattgttgttgattgtttgtacgttttagcgcaaggccttggtaatttatatttgagccgaacaactatttcctgctcatactctctacgaaagtaaaaatacatagaattcaccccggatcgacagctcaaccatggtttgcgctgatctttcagagagaattgggtgaagatgaattaagtgagtttcagtgggccgcgtttatggcctttgtaattgctcaataggatcagtagtctctttattagtctcttcagaagtcttctcggtagtctttcaagagtcttgtgtaggtagactgtagaagaaaggaggagagtactggatttctgtaaaggactatcgttgtaataaagctccgatggtctagtggttacgacgttgctttcccatgctcctaatgagcgatatctggaatcaagcaacagcccgggttcgaatcccggtcggtgcatttattttataaatttttttctaatattcaacccttgctagaacttgagttaggatgaaactttggaagacgagataaaataggattgaatttttgatagaatcatggaaggagggatactgttctaggcggtaggcaccccaaagagaatgtacaacatagtccaatttcttagatcaaaacccggggatggatggacaaaataattatgtcagcgtttatctgaacccggggcttatcggtgacgtcgtgttgtcaacagtgaacagctcaagtcgacatcaactctaactcgcaacgtccgttgaacaaagcaaatatgtctgatcaaattccctccgcaactgctgacccagaaaccgtcgaaactgcccttccttcaaacgccgaagatcgcaaggccgccgccgctctctcctccctcaacacaaatgagatcgcaacggagggtgcctccgccggagctccgcttagcgcaaaccaagaagctctgggaagggccatgagtcggctagaaatagctgctggacagggctcaggcaacaagaagacggctgagggaccgaagactgatggactgaaaaagaagacagttaaggttgctccagctgatgttacactgctagtatgtttaccatgtctatggcctcagtgctcgtctttgtgcagccttattgatgtatctaggctgagcagctcgatctaaataagaccaaagccacggagttgctcaaggctcatgatggggatgccaccgaggcaatgaaggcattcattgccccatctgttcaggcgtgttgattcaaattatttactgcttttgacacaatttaatgggttgagtcggaatgaatcaggtaggaacgaaacttcgtttcaacatatcaagagtcgctctttatgctaggggtctggttgtcacaaaggcatgtagacaatggttatcaacaggttgaagaaaatcactcctcgtcctcctctatctcatctttcttgtgttcgattcccttgccctcgtaaatactccacagcatagcccaaccaagcaaagactcaacagctagtgcccaccagacagctccaatcatgttattctcgaggcccaggcccagcccccaaccacccaggaaaggacccatggtccgacctgcactagcaatactctgtgccactccatggactgtgcctaggatagacggatccgtgacacagttgtttactaggatgatagcagcgggcaggataaatgtccgcgagatgacctgtaagctaatgacaaacgtgaaagagggccaaataatccatggtatgcgtggaagaaccacaaggaagggcatcagcacgtatgcaatgggcgaaaagggaaggaacgttcggaatgatgtcagtgtgcccagctttgtctgtatcatcgggtataggaagatctggagtggcaggccgatgaaaccaatgatagcagtagcaagcccaactcgggatgatggaagacctagtccaccgccgaaatggaaaagaccttgccgggagttctctggggcacggggtgcgggcaaaaatacaaatgtcatagagttgaaggcactggtgtggaaggcgagcaggaagtgagccactaaagtcaggacaatgttgcgtgtccagatctggcagaaccctattttcttatgcggccgtggatgcacgcgagagcgggctgggcttgatggcgtagaccaagcaccgaggctgccgtccgtgtaaacggagtcatcgtcgctggagcgtgtaagtggacgatagtgccggggtcgccgggcccaagctcttgtaagccgcttgcccattttacgaccccagtcttttctataacgtgcaatttcatgggtctggacggtttcattgttagcgactatatcagtacggatagggattgacctcacctcatcgagcccaagaaatactgcgagaaatgacgtgaatatgaagactgcgctcaaaagatttggcaatgcatagggccaatgctgcatccaccagacaccgtctttacctccgatagcagatcccgggccgaaaaattggggaaagctgttgataggatcggccaaagtgcctcccaagattggacctatgattacaccaatgttgaagcacatgggtaggagcaaaaacgcgcgggattgatatctaaacggttagctcaagataggatggcacattgtgtgaacatatcaacttacttcttctcggcgatgatctctgcaatcagcgtccgcatcactcccacattgctgttcaataccccacctagtgtccgaaagaccatggccgtcgcgaaagatcgagagaagccaaagcctatacaagacagacaggtgcccatcaatccgatcaacagcactctcttccgtcccatccattcagcatcggcaagacggccccaccagacagcggtgataaattgcgcagctgtaaagcaaccctggagcatacccgcctgggcggagatcttcgagtctggcaaagatggatcaaatgatttgagctgataaaacagatatgcctgcagagaggtctgcgttaacggctctgacagtcgcgccaaggtcaagattgccaactggccctttttcggtagcgagctccaagtcactggtttctcttcgtcttcctcgaccggcccgagcacgccgtcatgatcattatcttcatcaattgaggaaaatcgccgacgacttgttatcagcggcgcggactccaatctcctcggctgggggtttccgaaaattgcggtgtcatcgctctcaagatcggagtcgctttctgtatccgacaagtctacatgatgaccagtcaagtcgaaaccgtcctgggagacaggatggacatattctgggccctcgtggcggtcttggccatggttctggatttgcggagaagtccccatcaacggagatcccggttcgggaagctgtcacgcgagcgcgcctggggtagataccgatcgggtgtatgacacactgttgtgcagaattctaccttggcactttatctccgtacgtaaagcagtctgtaactcttgtagaaaagaaaagtcggggtgaaaaaggagctatgacacaatttcaccccacatttgcgtggggtcaatgcgatgaagaggttgccgagttaaccgcctggccaacaatggactcgagatatgagaccgtaaatactccgggcatgagtttcttaccgccagtctgtcaattcagattttgcatgtagtattcatagtttgtaacatgaatgagtgaactggggtattgaaccttcaagattggaactagcacgaactagtctagattcctcgagtagacaaattcgagcacgatttcaatcagcctatattcggtctatcacgcagccttgaataccacctattatttttccctaatttaggtagattactggcgggacccgaaccacccagatagtcgttgcgtctttcgtcctcgaccaactgtaaagcatgtaagcgtgacctttgagatggccactgactgatagaagatcaaactactagctgtcgcacctgcttggccgattttgttcgtatatatcagcgctgatggtgtgtctgatcaaggtcgccatagagggactcatggctatagatcgagagattcgcgcatctacctcgcgcaaggctttgatcagaaactccttgaaaacccgggaaacaagaataagaatagtatctatagtggcggggtggatagaagcaagccttgccgagatagaggaagtgagtggtgaattcatacgaaggaaataatacaccccaacttttgctagttagggtcagtagcaaatagacaaatgaaataaacaagggcctttgtgtgctttgatcactttgacttgagatctgattagtcgtggttcagacaatcaagcctttgtcgtgtccccgactttccaagtggctccatgaaaggcattcataacctacattgttaactctcgaaatcttcgatcaagtcggtttcgattgtactttcactccactcaccaccgcgtcgagttatcccctcggtgcagctctcatctaatcgtcaatcggctatggtcgcatccttacttcactgtctctttcgatttgttgtgttatttttagagtatcacttcactaacgactatatagcctagcacaggtctactaacagactttcacgatgtccccaaactcctctttctccggcgtgtccatctgggaacaggcctatcacgacgcatggcgacacttccaagcctccataatggaggtcgttgaccggctaagctggcaagatccgtcttccgaagatcgccaaaccacaatcgagaagctaggccgacttccaattgaggtggacaatatccgaagcacgggacaggccatgtttgagcatgtcccaggctgccagacagtgcgaaacgagtctcttacgcacttcgtcgatgaattcatacgggactgtcatgggctccatttcaagctgaatatgctcgtgtggagacttatgaatcgcccgaatagtgacaggacagtttacaatcgtcttctcaggctacttgattacatcgaggatcgggttccagagtgacccatcaattgcggtttgtctgcttgcattactctatatcggtgttgattttgaagattttaacctgaattatcatgaacagtccgcaaagagaaatgccgtacgcttttatgatgttatttggtggacttgttgactggcctggttctatattcccgtggactgtatcactatctgtactgattggatatgctaacagttgagcttataaacagtccgaaaaccgaaaaccaaacaagcgatttaccatacctttttacgagtgaaaattaaaattggataaagacagcgagagacaccggcagtgttttcgattcttttctttttgtaacatatcaagtcagaggtcaatcttcttgttcgcgatagtgccttataataatcgattagcagcatgatcagttggtcagtctatatcatgtagtacttacgtgggctataatttatctacatttaagaagaccattgaaatgacaaaactgcatatgcggcctaatattcttgcttatatataatgaaaaggttattatatacacggattatgcacaagaagtcaaagtttattataaacagccaggcaggcaaatgaataattatgcaatgctctacagggcaagagccagagccaaaacaccagccataccagcaactcccatggcaatgcccccagtaggagcaggggcgccaccagtagactgcgaagaagagggagaagatgatgaagagctggagtcggagctggaggcggagctggggctggagatgatgctggagctcgagtcagagctggagtcagagctggagctcgagatggaggtggagcccgaggcagtggtggaagccgaagtggtcacggcggcattggaggtctggcgggaaggagtggtggagccagtctcgatggcgctgctatcagcagtctcggtctgagtaccggttgccgatgcagttgccgagacaccagcgagctggtcgtcaaagttggaagtggcccaggccttgacgctgctaggcaacgcgttgtaccaagctgggtaggtgccagcggcagcttcactgatgatcacgctgcgggaggcagggtcaatgatttcgtcgtaccatgaggccgggatggctgttgccagaacactcatgattgagctgggcacatccgagatatcgtaggtctcatcgctgtcggcagtctcagtgcctgaggatgtagcagtaggatccgcaggggcggccagggccgtggcggcgaggaaaagagtggtaaggaccttgtactgcattttcaaacgagtgtgggagtataggaacaatatttgttgaatagaagagaaagaaaaaacaagctgacggagggcttaataaatatcttcggagccaggcgaaaccagggccctcatctattagggccgcgctagtactcaactagccaaacctaaccaacgacgctaaccgaaaatggccacaaaaggcttagtcgcgagacttggccaatcacagtgcgcaggggccttgtggtcgcctgattagacccgatttcgacacgagagttgcctgcgttcttcttcgctattcgccaacgattgggctaatttcccatgtccgccagcatttgccctggattgccccttttattgtttccgtggtccgtcttttctgttccaaatttagcttcagggtcggctttcgctaaatctggggtagtgaaatttctatacaaaactctgtcgccccatatggcatatcactatatacataaccaagttcgagaagagcactcatccacttgatcaaagattccgtcaaactcattcaattctaagtaagtacagaacttcttaaataggacgtgacgccttccatacgattgttcatgctaaggttactacttgatagcttgaggaatgaatgtcactagcctgctacacagtgagagttcaatttgaattgtagttggtcaatagcattcccctgtttttgactgaagctgtactgaactccagtagcaacctctatatcgtcacacagaacgatgtgggatagttaaatactatgccttgaatatcaggcattaaggtgagtcatccgagtccgggaataagcgtatcacgtacacaccactgtttagctttcttttgttgctcgtccttgatatattttcgctcatcggtcctttattactatttctaagaagtttccaatactctactgcctattccaactccttacccattgcatttgcttgttactgctggtcaaaccgaagaaatttgacccccccacctttcgggattgccttcaccatggccgaatggagccctagttgtaagagcaaaaatctgtaactctgtttcacatttgatccaatatcactgactatatttagcctggacacaaaagcccatcaagcaagatgtcatctacgaggatgctcaagggttgcaagactcattgcagaaactacagaagcttcctccacttgtgaccacacaagaagtatgtctttccttcagactggatcttagctattatattgacctggtttgaagatcatcaatctcaagaagaacctacgaaatgtcgctttgggcaaagcattcgttctacagggtggtatgtcgcacaagaaaagcatatcccccaaacaagcactaagcattctgtctaggtgactgtgccgagctcttcgactattgcagccaagaaatgatcgaagccaaagtgaagctcttgttgcaaatgagtttggttctcatctggggtatgtcagacccccacaaaaagcaaagaaacatgacaactaatccaccaataggcgccaataagcccgtcatccgtattgcccggattgcaggccagtttgcaaagtatgtttttcattcattaattcatgaccacaaaattaataacaaaactaggccacgctcaagtccaacagaggtcatcaacggagtggaaatgccctctttccgcggcgacaatatcaatggcttcgcagcagaccctgtatcccgccaaccggatccatcgcgtctagtctcagcctacttccactccgcggcgactctgaattatctccgcgcctccctgtcctcaggcctggcagacctgcactccccactagactggggcctgggccatgtaatcacgccctcaatcaaagagcaatacgccaaaaccgtacgcgcagtaaaggatgccctgcgcttcatgcacacggtaggaattgataaagaccgcggcttcgagacagccgacattttcaccagccacgaaggcctctccctagaatacgagcagagtctaacccggctcctccgccacccagcgcgcccaggaagcaccaccacggctcccgaaaccggctattacgcaacatccggccacttcctctggatcggcgaccggacccgccaactcggcggtgcgcatatcgagttcttccgtggtatcgctaaccccgtcggaatcaagatcgggcccagcatggcggcagatgagctggtgcagctgctggatgtcgtgaacccggatcgcgaagtcgggaaggtgactctgatctcgcgatacggcgctgggaaaatcgccactttcctccctggtcatattgccgctgtgcaggcctccggtcatatccctgtctggcagtgtgaccctatgcatggcaatacgcagagcacaccgtctggtgtgaagacccgccacttcacggatatcttgtctgagttgaagcaggcgttggaaatccaccgcgctgcagggtcgttccttggtggtatgcatctagaacttaccggagaggctgttaccgagtgtgtgggtggtgctggtgggctgacggaggatggacttggcgagcggtatacgacattctgtgatccacgcttgaacgagaagcaagctttggagctggctttcttggttgctggattctatcgtgaagagtctgaggagtgatatcatctatttggattgacacgagatatctgaatgttgaagcgggacagcgaaaatatttcgggcattatcatcgagtttctgaatcaaaagtcatgtatgttttgcaagttggcctcttttcggatatgagtaaaaagtctggatgtaaatcatctgggattgaattgatttaactgagattcgaagaaagtagcaacaattgtccttgcacaaaacagtccaacctatccggctcgccgcccatggggcaaaatgcaagaaacgcccaaacaaagagtccccgtatttacagtgactgggtatggatctaataaagcgaataatgtaatgaataaaatcaaggaacgagaggactaccgacggcaggcttgtaaacaaggctcttgcgcctggcagcctctatgcggaagcggcgctgtctcctagattcctcatcttgtccatcatcgagcaaggtactcgcaggcttagcactcgggaatagtcctcgattgctctgctttggcgggcaagattgctggataagcttggagcggttcccaaggaatcctggtgtagcgggcgacatgccaatggcatcaaggttggcaaagttgtatcccggagtagcagggaattggtatttatcagaagaagattgtcgttggggtgtggacggcatctcctgttggtgggtcggaggtgtgatcttgcggaaaccctcaacggcaccgggattgacaccactgcgacgtccgccggcagatggcgcgggagattcagagatgcgcacgagtgttccgttcacattgcttagtgcacgaggctccatactcttgcggcgcttagcgcctccgcgcgggatgatagagctgtcaaccgcgtacggagtttcatcaagccattggttttcccgttcacagctagaaataacaattagaaaagccatgtaaagaaagtgtacaaaagataaacttactcgaggacccagccgactccaacacacttgacaagacccgctgccttcttgactttctcgagagttcgcaggccaccatccttgtatacaacatgcgtgatgccaactctcaagtccttgggctctacaccatcacttggtgagagactggaacgagggttccaagaccaggacttcacacaccgagcacccatttgctgcaaaagttccacaaaaataccagaggcatcctcaccctcggtggtatgaacatccacatgcacgactgctccatgcagagccttctgctcggtgctcatactacgacgtggcttcttggcaggactggcggttgcgacaggattactgagcggagccatcactggtgcttttacactgctgcgtctatttgtgacagaacggcgctttggtgtcggacttctgctcacccgtggaggtttccgagaaggagacagaataggtacactatcgttgagtgccatgaagattggcttgcgaacacgcggagaagaccgagtgggagatgggctcgcgggggacagacctctcttgcggcgcagcttgagaggggatatgtcaccttcagccttcaaaggcacttttgagacagtatgaatggtgcgtaattcgtcgggctggacgtgagccttcattggggttgaaggaagaatcagaggaccacagttctctttgtcatcgagtagatggaagtcttgatcctgatcttgcgggacttgagtgacgcaagtatgctccagttcaatatttcccgagtcaggatcctcgaatatatccgtgcgtgtgcttggagaatctcttatttgatggtcttcataaatggaagatggccgtggagtctgttcataatcggggcttatacaagtagtaccgctttgaggttgagatggtaattcggcaaacaaagagggcgggttttccaaagggctctttgacaaatcaggatacggaacagtaccagaattcgccggagtttccttgttggtgcgatccaaggggcctactaatgaaaagactccacggcgacgcggtcggagtgatctagcttgggaaggcgtattttgttcccagcgaccaaatttttgtgccagtggtgtaaagcctatgctagcctcagcaggggattgatgctgacctgcaacgcttggtgtgttgaagagactgggtgccattaaagcaggactgtcaacctgggtgtttggtttccagctattttcttcatgcaggggcgtgtcaattatgacgttattggcattcttggcatcgagggtggagccatggtcattctctgagttgtctgggcgatttacggacaatggagtagattcgccgaccgcgaaacttggttttgacaaaggagtcgcttgcgtcctttcaagtggggttgtaataccctcaacatggctgctctcatatggtgaggcaggctttgacgatattgtagaaaacgcaggcgcggctaggatagactcagtatcttccacttcgctttcctcgctcgtcacttgttcctcgtcctcgggttggtgagtggcctcttcttgccactcacgctcactctctaagggatgagctaagtcaactgtccgctggacttcatcgccactggtcaaatgcaatggtgattttgagggcgaagcgagttcattcggcccctcttccattagctcttgcatctccgtagttcgcaaaggttctggagtcgattcttggcaccggaatcctgtatcaaaagttcggagttcttcctcctcaatctccttctccaatactgccagctcctcagaataactcgtgtcctccatgactgagtcaacctgatcttcttcgtggtatagatcattctccgcgcggtgggcttcttccatggcgtcaaagcaaattgtgtcaagctcctcgtattcaaattcgctctcgtcagggacatcttcaccctcctctaggtctgaggcttcctggagttgttggtcatggatatcacgcgctgccagttgggcctcttccatggcgtcaaagcagattgtatcggcttcttcgcggtcgaattgggcctggtcttcaggttgttcactagctccgggccctgcgtcttcctgaggctctggatcatagtggtcctcggttggcatgttggcctcttccatggcgtcaaagcaaactgtgtcaagctcctcatattcaaaatcgttctcatcttggagctcttcatcttcttcggaatccgaggcttcctgaacttgttggtcatggatatcatgcgctgccaattgggcctcttccatgtcgtcaaagcagattgtatcggcttcctcgcggtcaaactgagtgtggtcttgaagttgttcgctaacggaacctgaatcttcctgctgattttgatcatagtggtcctcagttggcatattggcctcttctatcgcgtcgaagcaaattgtttcaggctcttcatcctccggctgagccttatcttgaagatattcactttcgtcttcttccagttctgactctccctcggcctccgcctccaccgccgcagggagagggtcggtgtttccatcattggatgagtctggagctacttccgaggcagcaatatctttctggatgggagaaattgatgatccctttccatcagaagatagctcaattccaaagatgtctcgagccacatcttcgaccatttcagtgtccttttcaaaggctgcctcgtctggctggcttgtccgtggcgaggatttgggggtggtgaattgtgggcgttcaaccgtcttaaggggggttccgtcattgtccaccacggatgtatgagtggaaaatatcgagtttttgaatggcgaaggtattctttttgcggggctctgaaacaagggagttcgagcaagggctactggtgtggaagccttgaaagccgattgcgagaaattagcacccaaacccttcttaggtgacatcttcagtggagaaacacgtccgggtgtaaagtcgggtgcggcaattggattcacactgtcccggaagagggaacctccacgattcggggtgtctttcatggagaattggaagggagatgatggcgctggtcgtcttgcggggctagacatgatcatagaatcgctgaaaacaaccgaatttccagatggaagagcgaggtgaccattatctgcgactgcgttctggctgcggttcggtgcaaagttgattttcctgactggggagctaagaccgatgccgtctgatccgtgttttggggttggtagtttcggttcgccattctcgtccatgaagctggacgccttcttgggtgtaaaattgatcctccgtacaggagagctcagtccagtagtctctaaaccacgcttaacaggcgagtgaacaacaagtctgaccaagcccttggtatcgtccttaatggtgttcaattcatcttcttctccgtcggagcttgcataggctgatagagacttggctacctgcttggcctttttgggagataatggttgggccgtatccttcttcgctgcagctggtttccttccgcgagtgccggttgccacaggcttgcgaacaggggtggctccaaggccggtcttgccaacgcccgcactcttggtagctacccgtcgacggccgacagcagaaacctcgggcgcagattcctctgcttcggagcccgagacatcctggaatttcactgtcttcttcttggcgggcccacgtagaagatttgagcgtatagttgtcgagttagttgcaatcctaatttggttcgatttcgtctcattcgctgtatcgactgccgcacgtgtccgtctgctcgtggccgtagtttcactggcctgagaggtcttcactattgttcccgctcttggtcgtccccttgttttcggcgctgcctcagccttagtcgtagcagcttcttcgggcaacggattctttctcggtcttcccacacgcttttttggtgcctcggtttctcctatctcatctttgcgggtgttgttctggggttttgactggtcggtgagtgactccgaggaagccttccttcctcgcgcagtcacagttccagtcgcttttggtttggtagctggtcggccaggaggacgtccactaggtcttgcgggtttacttgtgataagccccagctcgtcatcggactcatcatcggtcgggggcgcagcccgtggtgctggaattgctcttcggggagctttcttctttgcatcggcagcagctgtcgatttggttgaagttcgtaccgcccgttttgcaggggatcgtgggattattgcagcgcgcgccatattgatcacgcgttgtcgttggtggtcgcagttagtattggcacgcgacactcatggcgggtttgggcggtcaaatatgatatcggcccgatgtcgcaaggtcgcagattaccgggagttgtcgaattaggtgcatgagaaagcaaggcaaagcaaataacccactgtggaggtggcggctgatcgtgggttgcttgttgtggcgtttcccatagcaacattggcacgtgatatgatctgcaaagaaaacatgcttgtcgacaaggatcttacattttgattcaaggacagattgaattatgaataaaaattatcaaaaagtagcagggtaaaagttgctctgatcatcatctaaaataatcaagaagttcaatccgccataaattgtatgccatcagatatatatttctactagatacctgtataattagtgtagttcagaaaggatctcctactactcctctcaatgtgcgtttattggccttatgctggtctaaagcaccgtgttgcacctgatagcagagctataaccatgtgcaaatgtgtacaagactccattgattaatgatctgaactaggtagggactatcagtaagcccaagttcgaatcaaagagtaaggctaggtttatttgcgaacggagagaagaaataaatgctaaacggaagtgtaaacatgttgattatatgggaatatatgcattgctatcgaattggatccgaagagattcgaagatgtctaggcaaataccaggcagatggaaatgacacgaagaacggctcgatggcacatccaccatgcttggaaaaaagaagtgtgtcaaatggcgaaaatccatgtcgaagctattcgcattcgaaacatgcagtgggaagaagaagaaaaaaaaaaaagttctgttacacaagagtaagcattgccagggcggatacgacaaccgcagacagcatggtaggcaaattcatcgtacccatgctagaagcagttaggtaataagttggatcataattgttcggtgtggtggagttcacggtaccgttccagcagtaccggtcgaaacactggttgcagatatcagggagagtggtacccgtgcgctcgaacgagcggctgaggatagcacagccaacacaagatgtccagtttccgtcgagggtgctgttggccatagtggcaacctcgtagccattgaggatgatattgtcacgctcagtgttgtcggtgcttagttggaaggttgagatgttggactggtaggagtaaggggcattggggatgtacacgacaagaggcgagggtccggtctggttggaactattacagccaaagaaggacgggcgggtgctgaggcccaggttgacgaaggtgttctggtctggaacagcagggaaggcggtgccgttgccgataccgctgctgttcaggctgcgctcgtaggttgcaaccaaggaagtgccgtttggccagtagtagtcagtgtcggctgaagagtcaacggcaaagatgacatcaacatggcgctcgggctggataagaggatgcaaagggacgttctgtccatcttcgccgccatcgacgacatccagaattttttgcgcggcgtacggcgacgagtccgggttgtatttatagaaggggttgggatcgtatgaagcgatatcattctgcgctttgtctaccccgtacaagactgaggtgaaaacgtccttcaccaggctggggagcgaagtggtgttgatctggagaaggaactggttaaagagtgtggaggagcttccaatcacaaaaccagcactgtcgaagccacggatgcagctctcgttgctcggaagcgagccaccctcaaacttagagcctaggtactcgaggggaatgaaaccaaagattgtagggtcaaaagtgccaaattcccacgggttgaactcatagacggtcgagttactgccaacgagcagttcaccgggattacggccatccgcaacaacgaacggcatggggtagtctccgtccttgaactcggaggtgtcggcaatggaagaccaggtatagctgagtccaccattgctagcattgaacatttgataggagagtgcgcggcccctgtaaccaatttagcaaatacgcacatgcatcccgataaataggaataacataccagatatcggtgatagaagtatcgaatccagccttcttcttcccctcgacagcctcgcccagttccttgtagtaactggcagaatccaaaagctggataccaccagtatcaggaccttcgaggatcgagtttccaaactgccagatggaaccatcctcgtgcgtctgcagcttgtcgatcgtagtgaagttattgatatagatcgaacccaacaaccagctgcctccactcagaccagcgatataggtagcagactgcagcagaccacctaaatgcccagtagtcgtcgcattggacgtccggctgtcaaaagccttgatcgcaccggcaccgttcatcaacgcacgccaaccgccgcctgaaacagcgatgccgatattaggcagatttgacgagttgctagagtgtttgtcgaggtaggcaccgacatcataatcgccgactttcacatggtcgaagaaatctttcatcgctgacagagacttactgcggcggaccttgagccatgatgtctcattggaggacaagtccgctgcgctgcgaactgtcggtcggctcgccgggcagctgacagacgtcggcacatacccgtcgggcgcattgggaagagctcgttgcacacctgcgaatgtgctatcatcattgaacccgccgggaacagcaattgcacctgcgaggacatggtgattagagtggagaaattatttggtagacgcgtgtacatgtaagtaagccaagaatggcgggaaaaaaaacctgcgaggggcagcacttactggacaagcccagagcaattgagattagagcaaaagtcttcatggcggttagatcacaattgtgatcaactgtaactgcgcaagaatcgtagagaaggatgaattcccatgtactaaggggggatacttatgcagcgagggtgaatacttatgcgccgggcctgccggaagcttagccaagccccccgatgtcccaggcagttcacttggatgtactccatatgttcatagggatcacgaatcatcgctgccgagtggagtagagtgatgtcaaatattccgaaaactccgtctttcttcacagactattgaatataggatgaaaaatcagtttgctttcgaggcgcaggtcagatcacagccgccatagaggtaaggctgcccaaatggcgctgggaaggggctgatgccgagagtgtcatgtgataatatcgatgtggccaagtaggcatctgcatttccgcagctttcattggagtaagtttcatgaatggctctagggctaagaatgcctaaaaatggacgcctctcaaatcactccacagttaaaaaggatctggcggaagtccaaggtggatcaaatcgagaggccgtaattggatcgcgtgtattgccttttaaggactgtaatcggatcgtctctactgcctcataggtacagatccaaggttatatactctaggctgttatggcgtggaactgaggctatggatgtcacgaatcgagatcggcactatttgaaaaggagctcagtttgaccttactaccaaatgacattacagagaagcagtcattagaatgaactcaaatttgaaaaaaagctaactaccagctgaatcgattgagatgtgacagaagcgtcacttcactttggaagttcatcatctcaatcgaaccaggcaaacgcaaagtcagcattcacccacgactagggccaaccccaacatggtctcccgggctctcactagcctgcacatgaccctcgggcaagttgttcaactcgtcctcctctttatccaggccccagaactggacgatgaagacggcgccaccgacaaaggtcaagatggcgaagatgccgtagttccaggccaacaaaggggccctggaaagcggtatcaaagtctcagctatggctgcggagacagcgttagtgaacatattcatagcttggacgagggaacgcatattgcgaggtgccttggagtaggcatactccattgaggtgatgacggcaaagatctccgatacagcaaccaggacgtaggatccagtctgagcccaaacaaggatatgacatgggtggacgctgccatcgtcgttggggcaggtgttagctccgaagccacagggcgaagtcaggtagatgtaggactgaacgatagcagcccatatcatggagagcgacgccaaccagaaaccgagggcaatcttcttaatggccgtgaattgaaggcccattttgcgcaagacggggtaaaggagcttgtcgcagatcgggacgaagataatcagcgccaaggggtcaaggttgttcacaatatcgttcgggacgcctttcacggtcatcgtgctagcctgtgcgttgagattgttcgtcagttggttgtaggctagccagtagaatgggaaatagcaaaaaactgcgcaagctgcaaatccacggtgcacttcatccacccatgcatcgtcaaaggtcatccacctgggtcgggattggggttcgatgttggagggcttcgcggtgtcccagaaagtgccatcgtgtgttcgtttccacatgatgtatggattaaagtgccagcggtcgcgcatacaaaataagattgtcatgatggccttgtaagttaccgagcccgccgggggagactggcgatagcgcttgcgaccccaccacatgatgggtggagtagtcaggaacatgagcgtgggaagcagaaaggccaaccagaagccgatatacttctccgcatagaccatgccgatctgaccgaccagtgcgcctatgttgataagcaggtagaagtagtgatagatacggctctgagtgatagtcgggtcgacgacaacacgctcaccagacttcagtgtacgcaccttgagattgacggcaggtatctgctcgacaaccagagcggatatgttgggcttgaagccaccagtacctaagcccatgattattacacctagaatgaacacagcgaaggaggcatcagtattcataatcaccggtggaatggcagagatcaccaaaatgatgtgacctaaaatggcagccacaatagaccaggagatggtcttgtatcgtccccagtactcgtcggcgatccaggcacccactagaggaaggcagtagcaccagagggtgttgaaggtgttgatagcgttggcagtctcaacacccttacccaaagcaccggagaaatcctgagagctagggccaccagccccggttgcgtggtttgatccgggagggccattcggggcaggaagggggagagcatggttcacgaagttagagtctgtgtttcaatgttagaagagtatatttatagggatgtggctatcttacagagaacatgggttccgtggtaggaaaaacgctcgcacagctcaacaaatgcgatggtgtagacagcccagggaatcggagctgagacgcgacgcaaggcattggggccatgaagttcatctctggttggatcctcgtcacccacgtcaaggttgtacgactcggggatgatactcttatcagcgacctcattgcaaactgggttactttgcagggtggtattggcaggctcaacatcacggataacgagcgagctcgagtcccggcctgtggcctgagctgccatcttggatagaataaagattcgaggctagtgcaaggtatgcaggatgaacaataggagagatgggaggatgtgagtggatgagaggaggaagaaaaaggaggggaatgaaaagagagaagaagtaaacaaagtaaacaggcgaggtgaaattcacgtgttgggactgaagtcgattctctcgcgtaggttacccgtagtaaagccataacttcaacagcagtcatgtcctttcttaccctgccaagacaggacctaggctggggctatacgactcaacatcaagtgaatcaatataccaaagcagcaattgaagactgatagatgtagcatgcatatgccaaactatgtaacctgtgctatgatgttagagttttcgttccttctctatagctatagtgagaaacataacatatatgatatagacgatattacctcgtgaggttacaatggcgcaaacattctattcaacaaaggattcttttgaggtcaaattaaccccgatatagtcacaaagtatcatgatcaagttctttgcaggtagaggagcctgcagatagcaacaggattaataaggtattttatatttcagcaaagaaactacgaagaacagaccttgaatgctaatccaagatgtgccattggcttacgtcacagagtgtcctcatcctcatattctcaggcctgccttgacctacagtgtgtagtcttgtgtagtcttgtgtagtcttgatgcgggttgaatagtataagtctacatattattcatccataaagccatgtcttccgctacccgagtacttggccaagcaagcaatctagtttgagactgcttacctatctgggctgggatgtcatcattagacaaacccaaagcataaacttccagcaacctatccgcattctgccatgcccctagaagactatcccaagtgattgcttgttgtaagtacataataggctaagggtaattaaggtattccaccagtaagccaacacacagtcaagcacccggctcgacgtctgattggacccagttctccgcatcttccccaggttcggtgtcagtcccgaactggttcttggcggctaaaaagaaaagacatcagaatgacgattacgaggccacgtacctatcacgcgataatttgtgtctgcaggttaccagatttagcaaagtcattcttttataacatatgtatccccaacatttgatctcttttagattaacccttaagttcgttgagcagcgttgttgggaggtctggtgatctctggtggtctaggtatgtggtacattccgactggatggctggacgcggttatttgtgggaaagtatcagggttcgagttcttagtggcggtcgtacgtaaatacaaggctacgcatgacagtgaatatatgtcattgcacaaccatgagattcgattattgatctaactcgagtaggtaaagattgacatgcagctaaaccttagaacgaggatgaactgttcaaacaattataactgttattatttgggcgatcgacttgtgtctaaagtcatcataggattcaaatctccaaagcggattaaggctatccaagaaaaggcaatgatcaaagccaaattaccaaaaatgaaagcccatgcgcgctatttccgccaatgacccgaaagaaaaagacgcaggacgccatgcaatgagacaaaaagaaaatagtcacgcgcagtgattgaaaaggcaaaattgaatctcggccataaaatctaccatgcggcgtggccaccatccattcgcaggtcacttccagtcatgaagctgctagcatcgctaatcaagaagacagcggcaccacggtactcttccggtcgggaaagacgggcaagcatgttctccttgggccactggtcgcgacgttcgggaaactcgagaaagagcttctcaaccatggcggtgacaatgtagccaggggagatggtattcacgcggatgttgtaggtgccccattcagaagcgaggttgcgggcgagttggaggacagctgctttgctagcgttatatgcggggcaaataagaccctgtagggagaatatgttagatcatcgaggccagccagaagagcggaacgtgacatgaagcggggaaatgttccatagagagaaagaaaggaggggagtgggaacgtacgcgattggcaatagtgccgctcatagaggcgatcatagcgatactacctccgtttccaaagcgaatcatttgcttagccacagcctgggcggtcatgaacacccccgtgacattgacctcgaacatggtgttgctgtccttggctgagtattcgagcgctggggtctcctgctgaatgcccgctgctgcaatgagaccatccatgcggccctcttcattggcgatggtctcgatgacactgttgagaagttctgtgtcacgcacgtcgatacgacggtagtgcaactcggtgccaagctccattgcgcgctgttggatctgctcaaactcgggggcctggtgattgagtggttgttagtttagtgctgccatagaagcgagggatgtagatacttaccggctcttccagacggtcgagtgcgtataccttcgctccggcctccaggagtgcctctgtctgggtcaatcctagaccacgggcagcacctgagaccaacaccaccttcccagcgagactgaactcgggcattctggacttctggcccagcaggacgggctgggcggtaatgggtgcagtgggaactgtagtggtttcgatggagacagacattgcgatgcgatattaggtgagggtagttggaaagtatattaatgaaggcgtcaaagattattagactgattgtttcgcgtgcagatgaagaataatgaggatgttccagtggacagaatcaactccctttaaatacatatctttttgaccggaaaggccagaaaaaaccggactaaagcgactccaggtgtctcgtgaacagaaagaaactaaaggatatcccaaaaaggaaatccagatttggaccaagggtactgcagagcggattgagtccagacttcctggaatgcaggctaaacggctgtggggaggcatgcacagcctacaaataggattaagacatataataattatctacaacatatggagtacatagtacttggatactgcgtcaattgatgtctcaagcaaataaatttgactctcttgtgttctgcgtcatacttacgttccaattttatcgaggggataactacgtgtaattcaggaatagctcatctcacaggccggaaaaccagtcaccaggcatgctaaaactcacgatagttggtttctcgacgatagtgtggcagttcggaaccttaggccggatttctcgtttaggaaacccgtctggggaacccggggatccccaacgccactctgatcttcgactctcaacattctttttcttgatgtttttgcaaaagaaatcaatccagatgacctcccccttgacagagctacacgtacgtacatcatagacaaattgccgagcctcgagccgggtcttctagaaatcatccactccaagtatgtactatccggagtcaggtggctctttgcagatcgacgagagcccctgccaatcaaattagtacatatggcctgtgatatcggttcctgtccgatcgccccggctccaaggtgacggcccggacgaaaagaaattcattggtcaattcctatattaacgtccaaatatcttttttctaaaatgtagaattcgaaatatcagatctcggatttagactaggatgccttagtcatcagtgaaagtcgatgtccaagtcgaatagctatttccggatttcgaggaagtacagatctacaacaaaattcggactcgaacatcgaaatccgagtccagactttgtgctgctactcagaccatagcttatcttgccataaaccctgcactaatatccattatcaatcagccaaggacagcacacaccttgtgaccatcagaatcttcattcccagctccttactcaatggggagattccgaggtttccactttttcttctgctctcgtgatgtctatataccagctagatttagcctctaccatatcggtgtgcactctgcatacttccaaggttcggccgcgtgtccgattatggcttgtttgtacggatccaggggccgtttgtttgtcggaatctggtctgggtcttcttcccccctgtcgtgcacttcccgggcccgccccgagtggctcggaggtctcgcatcccacatgaagtgtgcgtggggtatgatatgcacgggtcaatgctgtcggtgaaaaagtggttagctgagaagggaaaaatatctcatcagttcggggttcctccgttgccgccggaccctatctttttgtcttgcgcgactttgaataatgagccttgacatggccaaggtattttgtacctacctacttcctatgaacgtagtattataaaatgatctgtgtagcattgtgttgcacttactgcattcctcttttcccctcttcgttcatttttatattcttactctagacggccgtctttcaaaatcggtgtaacaggatttcttacgaaaaagttgctaccgcaggacttgttgagcccagctgatcaggtacatacacatgaaagaatgggatttaggtactgagatgtatggtgcgcagttagattaacaacatttggaccttggaaacacggaatcgagaataaagcttagccttagcattccaggatcaatgaagtcaaataccgccaaggctcctccggacaatgccatgcgaacattgcaaccgagggaaacccagtggatcaagcggggcctgtcgatccgtaggttaagttcaggttaaggataagcatctgcatcccgtgcaagggtagatcgcgatgatcataatcaagtggggaaagcaatttaggacatcagatctagtcgtaccaataaccggtctagtcttatattcccaaggctacagcaccgttccaaggaagctaaaatgaagtcgaatggattggattatacatattaggggaaatacctggtcaatcttaacaaaatgcagatgtcaccccaaaataccgaaggatccctcggtgctatgtgcatttttttgttctctttcggcttccgtacaagtacaacccaggtttgagtaacatcaagggatacaaaagaagatgaaaaacatgaaagtgtaatcccatcctatgcagattcacatgagaagaatgaaataaagggctgtctagccatagtaggagaaatatcttcaagaaaatgagggagctcaagcatacacgcattcatacgtgagaaaacaactccatgtgaacgccggttccaagacaaatatgggagatatcatgagatgcaaaagggacgcagaaccagaagaaaaagggaagaaatgcaatgcgaatggaccataacaatcaacaaaatccggttgatttttgctttttgatttgcttttggtgttttcgcggagctaggcttcacggtaaccccaaatacgtttttgttcactcacccaccacttgccaacctgctcagcatcattgagccaatcagcggactcttggccaaacttaggcttaacctctttgatgagggccgcgagagtccacgccttggaggggtggttttcaccggggtcttcgctgaggtgagtgaatgtgtactcgaagccatccttcaagggcaggattagacggtagggaacgtcggctgccatgatggacagcatagagccaccagcgttgatcaggcccatgttccaaacggagcgcttgggtgggctctctgggtgggagcgggcttcgacctgggtgtctactcgctcgtgctctgggtgctcatgtggtggaggatggtgatggtcacggcggttgggtggttcctccatggaagagaggaaaggacggatgagggactggccttgatactctgggaggagggcagaggcgatgccggagtcgcgctcgtctagggaattagactggacgagaagatccaggatggtagggacaatggaaagggcggttacgttggcagtgatgtccactcgaggcatgtgcgggtggtggaaaaccaagggtacgcggaagttgctaatgtggccattctcatacgtgccggtcatgtccttattatcttcgccgaaggcttggccatggtctccgacgacgacgactaaagtctcgttggcaatgccagtctggtcaagcatagtcattatatcgccgagccataagtcgacgaaccgggcggaattcaggtagttgttcatcaggtcatggttgatgcttccctggtcgctcatgtatggttctttctcgaagtcgtctggcgtactccaggggtggtgggttgtgctggtgacatgtgaaaggaacatgcgggtcttgttgtttgcggcctcctcgaagaggtctaacacgtagggtcggagctcagtctccgcaaatccgaagtagttaatctcttcgccctgagctttgtgtttcgagtgaggggaaagcagattgctcttaacgaccttgtgcttgaagcccatgttgttgttcaggatgtcctgacggtcatagtcatcggtgattgactgcatgaatacagacttccaagggtttttgagagccgcggatttggtttcagaagaagagttttgcaagcgcttctcgggttgcgacttgccctggttgaacagatcgaaaatctgtggcaagcatggctgataaatttcgagcagagactcctctagaaggtccactggcaaagggttcacaccacaatggcttcccaaaacactcttgaaggtcaaggagctacccgtcacggcgccacgcacattaagtccacccataccttcttgtggcggggtcttccatggagaatggctcatgtcgaccttgtttcccttgctatcggttgcgtactcgccagtcaactgttgagcgaccaaggtcatgttgactagacgatcgattgcctcgttgactttctgcttcttatgagacgcaagaagaccatcgaacaagggtgtgccctgttgtgtggggaaaagttccttgcggccactttcgagcgttaacagcactatatggttgacctcaactgagtgctctttgaaggccttctgcagcggctcataaatttcaccgcccagatttgtgaccatcagcgggtcagtcttggggtcgtagaatgcactctcatcaccggtgcaaacaaaagaataatgattgtccttcactgcacgctcgctcgggctaagatcccagcggctgaatccttggggtgggttctcggggagccatggggctcgtgaccattgttccacaaaggtcgagtccggttggaactgaggacgagagaccccattatcagccgtgagagggaatggcatggcaggctcgcgacatccctccaccgttgccgtcttcttctggaaagcatcgagcagtgtcaggggcagagctccggatagatggtcatacggtatagcgggccgagttagttccaagaaaataagcgatacacagattgcgactgcgggaataatgcgacggaatgaccggaggtctatcgaggtcatgcaggatttgctaggggcggaaatcaatgtataacgcgctttgaatccccgtatggacaggtctcggattgcctgcaagccaagaccggtgatgttgtacaaatgcgaatgacgcaaccacgcaatgagtccgaggacggtggccgcagcggatacagtcgagataccgctgaggagaattttcatggccgccggatcgcttaggaagctaccaccagctgcccaggcgacctcggcaccggtctgcataaagaatccgaactggatggaggaagcaccccatgtgatcaagctattattcgtgttagcttgtattgcgcaaattcccccctgtcctccatttcggtattcggtattcggggtaaacatacgatagtgcccctcccaacccagtcgagagccattgccatcgaccatctggcgcatggaagcgtaacaagacccgcacgaatataataacaaacacatctggtagaatgagtgtgggcgaatagaggacgaagtagaggaacggtaaggagcgaatatgtagcgcaatatgtaaagccttggaggcgagaccgctcacaacgagtgtggagaaaaggaagggcgacaacggtggtaagagggcgaagatggacatgttggaatcatttcatttgtacagtggaatcgcgcagttggcaacgtagggggagaagaagagtcgaagaatgtcgaaacggcaaacgagagactaggcagcaagaaagagagaacagaggagtggtcccgggaggaaagggaagggaaagggtccaagggttattcttagatatcacgaaataacagaataaggccaattaggcgatgggaaattgtgcacgcgactagactaagcggctccaaatttactccaaatgcttggtttcgcttctttttatttttattctgtgtttttttttcattacgtcgccgaaaccactcttcccatccggtcaacctctcatattgtccctaagttgcccaagtggagaccggagaggctgtacagattattatgtcccagtctgtccaagtttatgcagccactaggtggaccctgcatcgcactattcctaaatgattcgctttcgtgagaccgaaaataaatgatacagtacagtacagtaagataccaatttcatcgaaccatggaccaccacagcccgaggtcatgccaatcttggcaggttccaaggttcggacgttacttcccaaggttctgcgaaaagggggaacattcaaggctgtctgcctgggcacttgtgcataaaatccggggaaaaactcaagatttgcgccgatttccggtttccccccacctactgtatgtacattgcccccttttagattattattattaatgatcatcccgtgtctctgagattcaattgtggatagtccgcggatagaacaatcgaactttgtctcggaatacatctaccctgtacattgatgtgtatttatatgtacggagatgtgcacgtatttggccatgatccaggggtatggtcggagactgtgcacggacctttgtctaaatatgcttggcggtcggccttacagcggacgacctgtatatttaatatgacgactcggatattgatcttgacatgtgtgatcttctcattcggcttgctgaagccaagtacaacatacatactccatacatcgtattaactctagtgtcgacacctggtcccacgatcttacaaagtaaatataacgcaaagccagtaagacctggtggagtactccgtagagacatttaaaagctaaatgtgaaacatatttacctactgtacagaaccaaaaccgtgctagtctacaaagtacatactcttgaaagctgagatttgaactgaacacatttccgtggttttatatcatttatgcatatttctcattcttcatgatcatcacgtgcaacggcaaccacagtacataatatcttcctaagtcaattacaccactttctgctgatccttcatggcagcacgctccctaacacaatcagcaatacccctcccaacgtccgaccccaactcttcaaacccttgcacaaccccctcccgatccccttcgcccatctcctgactcatcttaaacttcccctgcaatcgctcaacacgaatctcaatgccaagaatattcttcttcaaaagctccacataattaaccggcgcatcggatacattccatgcgctcttcttatcacccccagtataccccataatgccctcttcagactgccgcgacaggtcctgaatctgtttttgcaaaaacgcacccgtttcttctgccttggaattgcagtacacactaatcttgccatacgcctgcacggcggagtagttccacgtcgggacgaccttgccagagactggcttggttgctgtgtagaacttgggcgtcacgtagtggtggtgggggccgttgaataggatcagcacctcatccgtgagctcgaatttgttattccctgctgcgttttgctcagcgagggcttccatcaaggcttttgcttgtgggttctgtttggccatgtggccgcgcaggatgccggtcggggctgtgtcatcgccctcggtcgagggaggtacatcgaggacgaaggggacatggcttgattggatgaatgagtagatcggggatttgatggccgttgttatgatgccgagtgggttatcacggatgaattgctggaggacggcgagttgtccctcggcgtggacggcgcgaagatacattgtagctatgacttggagaggactgagagggaagtgtattcaatcgatttgaagtaagtataaaagagaaaggaacactcgtataagtatgagggggtttatcactatctatcatagcatagggcgcgatttagatcgcatcccactcaatctagggctgtcatcttgtctctctgttgtatgattggtagtcggcgccgaattatcgacccgaggtccacttttctatgataaagctacaactttaaggttctagttagttagttttctgtgttttgtcagcttggtgactcggggttgtcgaaaactggagaccaactgctcgtcatagtaacaaagtgtcaagatcggtagtgccaagagctctatctagagccaaagccaccccgcattctgggcctgagagctgcgtattctcacgattttatacagccgtcctgcgatatgtcagccagtttgaacttgtccgagcttgttagtatgcaccgcctggtggcggacgctggctggaagtcacattcttttaaaatatccccgatgtatcattgcgaagattcgcgcggtttcgattggcaacagcggctgatggccaactctattccccaaacggactaacagcagtgcctgagataccttccccgagggatcaccttcccgtcgaagttgaagagcctcacaccttaagaatgctgacctggccaatggtaaaaggttacggcctgaccttaccgtaccttggacctgtggtcaagttcgaatttcaatcaatggctaccctggcattccattcttcgcttaaactggcgtccaatgtagcggtttcggcagctgattgatttgaagtcaattataatcgtgctcaaacactctgaggatcatcctgacaatcgtggaaaccccctttctcattaatcctgagggttcatcaaccatttttaaattatcgagctttgcgtcttttgagccgaaaactgaaacccctagagaagattttcataacgggtttaactaaagaatttgatattatcatgagtagggatgagtgatatacagagtatgcaggaagaatgacgccaacaaatgatcccaatgcaccaaagacaccgatcgatattttggagccaaaatcgctaaaacaaagagctcgcctgggtaggggacaaatatcatgtgatacgcgagacaaccccatccttccctaaccgatccaagacccccttcttcaacccgaggaaccgttcaatatctccacggcgcttaccctgcttatcccgcatcgtcaacacctgttggatagtcacggcatccaggaacgatctccccggatgacccgcatgaccgaagtgctcagcttctttatccgcggcctctgtgaggcgttgtcgagcagtgacgaccagtagtgccgggttagaagcttgtgggaagacagtttgcattgagcctcgattgaaagtgcttgagtttgagtatgtaggtgatggatcgacggggcctattgaccggagggaggcggcgaaatgggggtctcggccgtccatgtcgatggctaaatggtcgttagtttgtttccttgctggtcttgcattcacatgtagaagacttgaataaatcgctggcgagtgtacgtaccatcagacttcacgtcggatgctttctcctttgagtggtattttgggccctgggaggaaggtgcaggtgtttgaggaggcgagggaccagcgttgggtttgggcgcggaagtaggcgtaggtgcagacgctgctttggtttcttttggagctttgcgcggtcctcttggcgggggagccggctgcttggggtattggcgccgtgaggctgcgccagccgctgatttggcgggctttgaagcagcagaacccattgagaatgatgggctgtggatcgaaaatgttggtgtaaggcgttgcagctttttgcggagctttgagtggaggttcccgatgtcgccttggcattacggcctggacttcgggtcggtattttgccagcagaacagtcaagcaagacttctcacaaacccgagtatgtaagtcatacaagttggtatttaggaacatgtcaagcagaactaaagacggtagacattctcaaggatattgaacaagctcctgttgagatcaatggcctgatctctgaggcaggattgcataactatataactataccgtcctaggcaggcggtaaagaaagcggtctatctgtcctgacttgtgacgtcaaaaatacagttaacaaacagcttccttgggagtatgagatatgtatctagcgagatcgcctaggtagagcaacacatactcgtccgatatgtctagaaatgccaaaccaaatgttgaagggcgttggcgggcagcacatgttagcgcagctacttatctggagagtccaacccaacccgtattacagacaattgggagatgatcacatttgaagatcggcgagactttcgtgaaattccagtggaagccctgttatgtgttttgcgaaaacatactaggtatcactgcagctaggatacaataccaccggaacctaggaccacacggcagtttggcagcaccgtgagaggacaaacaggaccacggtagataaattcatgtatgttccggaaatctaccggagaccagcaaggcgccggccctgcacttcacctagcgcgcggctgccactaacaaatgcgatcacaccaacaacagccatcgcgggaaggaccttgaacaagttccacgaggtatagtagaggaagaagatcccctcaaatgagatcaatgatccgaggaagacggcatgcgagagaggggcagacttgaatgcggagggtaggtggttgacgttggcgccgaggaagagccactagagacaatctataagcaacggtcttggcgcagaaatgagatggacttaccaagccagcaagagcggggaaagcagcgccgaccatggcgacaaatgccaaggttatgacaattggcgggctagacgcagagtccttgaagatatggtggatctcgggcttcttgccatatcgctcggtttcaacggtcggcacggcctctccggggttacgatcgatcgacaacttgaacacagagctgtcgtaggcatcggagcttccaaacccgccaatgacaacatgcgcatcaactgggccggacagagagaggaattgaattggcaggtctttctgggtctggagggcatgtgttagctgcgccgcggaaagtcttttggggattgcataccaattcgactcttgacttgccattatccttgatgttgaaagggtatgagatatccaatccagtctgagcatctttgagcaaaaggaaagcctggtctgctcgctttggagagctgtcttcctgggctgtcaaggtgacgcgtaaggtatcggcaccgagaagggagacgggcttggagagcggcttggatgcagtaagtctagtttgaacacattgattagtttcatgtaccctctacttgagtcagaatacatacttttccttaaaacctccattgacaccagcaccttttgattgaacggccacggtggcatcagtaaagccccaagctgcggcggcagcgccaggtagtgcagctgcagccaataggcaaaatgggacggtggcctgccacagatgcattgtgaaagaaataacagaaaattaaacagaaactaacagaaaacagctgtagagagctcggggagatggtggaggatagaggagttgcagaataaggcggacaagtgaagccgataagcgccgatcaaccatagccctaatttcttttctgtcgacctcagcatcttccatcactttatttcgccttatctcgcacaaatacaattccaacgtccgcctagtccttacaagcttgtttatgaacaccctagaaaacaactgcggatggtggtacctctgatttcgtgagttctgcgcctatatgtcgggccctaattcccaacttctccctttccgtgcactgcggtcttctgacgtcgaccctgcccttcacctgatgacccccctataatgttatccacgccctagttgcctggtattggaggtatgggctaggcttccacttatactgttcattcactctatttactgcccgttctattcgcatggatagattatactgacaaattgcgggccatttagctttaattcacgatgcctccaaagaagggccagcgtaagtcaatgcctgcgcgcatcaataaggcgcctacattgtcaccttcccggcgctctccccgcgtacctcgcccgtcaaaaagtacaaatgagagcatacaacccgccaaaacgttgaacacatccgccagtcccaaagacagttctagcaacattcttttctacactccgaattcacctgttacaaattcaagttcacgtggaacgagtcccgaaacaccatcctcgcgtcggcgggcgttccagtctcgtccgtcacggctctcaactgtttatactccagccctagaagccccggccaccagctcaagtagtcgacggacaagaagaacagctgcacttgaaacaccccagaaagaagtatcagatattgactttccagagagtaatggtagcgccagctggacatttgaccagtacatgggcagctttgaatccgaaggaacagccgatggtccctccagccctaccagtgcctccgacatgcagaactcatcccgggttcgcaagcccaccatcagggctattgaatcttttgaatcaactaagaagaagcctcgccgcaagaacatgacagtgtccgccccgaccgtcgaaactcctgcccctgcggctaccaaggttgcaaaggttgcgaagaacaatgtttcgaagcagccaatgagaagaacaagaaggtcaaagagaatgaccaacttgaacatgcgaaaaaatgctgtcttgatcggtttcgatgttaacgtgaaggcggctggccagagactatatgacttgactattcagtccttcagccctgactttactccgcctttgaatatccctgtattcttggagcaacagcgaagtgaatatttccgtcgccaagatgaagaaaaatatggcgtcgacatgcccgccaaagccacgccgagtgatgtcgatgtcgatgtagatatgatcgaccaagacctcccagcgcctgtgatcgcttcttcttctcccaccccacccaatccccccactcctcctactcctcccactcctcccaccgcagtcatcgacggctcaagcatcctgagctacaagaagcagtctgacaccaaggtcggtagcgatggctggattcaaactggctacgttaattccagtggtgaagaggttgctttgctccccgaaaattgccatccatattacccgtcccatacttacggctacgagggtctcccttttccaccagtgcgcgccagaaccagccagcaggccgatgccgatgccactcacagcttcgcaccgctcctaggagaccgtaacctcccatctgatgcggtggccccattcgtcactgaaaatgtggaggaggaaaaggctagggctctggctcgggcccctgtgccaacccttgcgactaagaagcctcgtacccgaaagcgccgtcaaaccgcggccgccgatgagcctgccgcagcggttcctgctgctactacccccgagaccggcgcacgcaagtcacagcggcgccgccgccagaccgctcctgcccccactctcctgtctcccacctcttcccttaacactgcgaccgaggtccagtcttcgggcccggctgccgccgtcgcccccgctgccattgaaggcgataaacctaaggtgcagcggctccgattgactttgaagccggcgcccaagactgaggcctctggggttcgagcatctgcttccaagaaaggccccgtcacgcagtccctttcctcccccgtcctctcgcattcgcgtgcgccgtcctccgcaccgaccaacaagcgccgccgccgccggggcatgtgaggccccggtgagggcaaaatgatgaggcattctgcccggctgatgtcgggcgatgattatcactcttcgttttcttgttttttcactttcgacctttttgtatgattgattaccagcgggcgttttcaagcatgtatgattagcatcgcggggcataccatggagttaatggtgaattatgagattttttagttgtctttgtccttgccattagtattgcttcatttcgtactctttttgccctcgtggtcctcgtaaaaggtagaatctgacatgtcacacgggtcgactttctgcttacttttgccttacatctgatttactttgtgcgttcattcgcacacaaggcaggagatgtcacctaggcacctccctcatctcttctttcgcttttctcgctctctagttacctccaactttcatcgatcgaccccgggatatggtaaggatgactcattacaccacaccttagttatccaaaacgtacttagactatatagtttcggatgccagaaatgtcgtcgataccatttcgaaaagctcatgttgaccactatgtccgatgactcagattcagactccgccgacatcgagtgcttccgggcactacccgatgacacatgaagccatcgggtcagaggccaacgctatccggaggatcagaaaagagcaggagattcccttcagggtgatcaaatatctgcgtttcacaaatgccccaccagctattgcggaagagttttctttgagctctactcgacacatgttcaatcacgatactcgatctatgattataaaacaaacgaggaacggatcgagtaccctccgaactccactccaaacacacggcgagtgtagacgctttacgtcgacatgtctcgctgcaacagtacgcggatatgacatcagccatggcagaaggctttgatcagagggcgcaaaaccgacatccattgctgcctccgccgctaaatcaccctactacaggaccccatcttgactggagcctatgagaccgcttcacgcggcctgctttttgaagtacaaaatgtggtacgcgatatgagcctagcgcagtcgatccatccggtagggtccaaacgcgtccgatgtgtgtcttcttcaaagcaggccgacgagtggtgggtccttacgcaacctgttccaggtcgcaatgcaaaatggccgaccgttggggtcgaagttggagtctctgagacatatcgaaagttgaaggcagatgcagaatggtgatggtggcttacaaactcgaagggcgatgtgaagcttgtaattatcgtatctatcaatcgacagaaacccaagatcaagaagtcatcgcgttattctcttaggactttcagaataggctttagtctgaattaacatgtagtttataataatcggtggttgaagtacagtcaacttcgtcttccttgtagacaagcagtaagttaaagtaatgcctcaggcgcgaacacctccccgaaattccctcacagaattcacatcctccaatacaccaagcaaaccacgtaagcacgtcccagcaatttctcctatgatcagattcgtctaacaaaagccaagaataatgtcatccctcaaagaccagcaaagataccgatccatggatcccaaaacccggcctccacgtccaattcaacaacccgctgcttcgcggctccctaagggggtggatgatatccggaagacaaaggagtacaagactgctgcacggaggtaagtgccatcatcttctgtcttcgactctgcttccgtgtttttgtttgcttggttggcaaatgatacatggcgacaatgagaaatctaatcgcctttctagatggacaacgactattgtcggactaccaattgtaatatatacatcatggattctttatgagcgacgtgagttctttgatacccagtaaaccttaacattctttttgattgtatatacactaacttatttcctttagtctatcttggcaagagtcctaagagtcgtgaagatcagaaacagaaggattaatcttctttttgttttaaattcttctgggagcaggaattctgtacgattcaaactagaatggcatttgagaggctttacaactgtacataagaagccctaaaacaatctgtcttctctcgtctctatctaaagcagtctcttaagggggaaacaaatccggtttaatgcattcattgtaaaatccaacgcccggagtctcaaaatatatccatggctatggataggcgagaacaacctacccagccgaaataacataaacagaagaaaggtacaacatccaaatgcataattcccaactttggaaattttgccctaaatcctccccacattgccagcctgctggggtgaaaagcaagaagaagagaagtatatataatccaaataaggtatctggaagagatggaagagatcatctaagaaacgaagtaacagaaggataaggtgggggaaagagatcgtatagatgtcacagccctgagctctaggaaccatcaactggcaacgccttggaaaggaatctgttgatcccccgagccagccgacggcggcatagatatcgagttaccgctagcgctggcgggcttcgaagtacgctcacgcatgcgacggccctccatgagaccacgcaagccgcgcttctggaggccgataacactgcttagatcaccggtccagagctcacgttgggggcggcgcagctcggcgtctgcgtcactgtggtgacgagtagagcgggactgcgaccggctttcatcgccactaacccattcggagtcggactggctgaaactagcgctagacgcggatgtcgccgtgcttggattgctaatagaatcctcgcggtcgcggcgggatctgcgttggcgcgaatgcagggagacactggtgtcaatgcggagagatggaatacctcgagcaaagctgctgagagcgcctatgctgctcgctactgatgcggaggcaccgccatgctctgtgtcggacgagcctgatgtgagtgcaccgtgttgggagttgctgtgttcgcccaatgttggcgcagtgccgttgtggccggtgtaggctccatttagagcctcgagtgtacctcctggtccaccattgaatccagtaccccgaccaccgccggcggccatggcagctgcgttgaatacagccgcggcgttgcgcccatcaagaatctgatggagtctttcgacggtggcctctaagagtccgtcaatttggtacggacgggcaagctgtagaagcgagcagagaatttgtggtgtgcaaagcgaggtgcctacggctgggagagctgaggtgtagaggtattgaaccagaacttgaagagtcaaaatggtatgggggagatacagcacacgcggtcgggaggtcggggcgaggctgtgagcagatggaacttcaaggttctcaagtaaagacttcgaaggtatagactgattgacaagagttgttgcatcggagcctatcgaaggggtgatggtgatgctcgagttgcggctcgggtgtgtcagggacggacgaagagatgcgatgtctgcaatacctccgtccgacgattcgcgaagaagttggataaagtacggaccccagcgcctagtcaatatgcgagagttgacggagatacattctccccctatagcctgcaattccatgtcggccatctctggcaaagattgcgcgagcttgcctagctcatcggatgccgcagacaatggccgcccacccgatgtcaactgcactagcttcttttgcaaggatgccggaacagaagaggagctgtaagacttatatcccgaggttggagaagtgcggcaagcattgttgtagaggccaaacgcctctagttcgaccagacagacgtgcgagaagttgattcgtcggtggttgtaatcatcgacaaggcttcgcttccggtgtccaagaatcacaaaggaattacggcgaggccaaagcactccccgattccaactaccctgcccaaacaccgatcctccagcatcaatacgaccccaagtcaatgtcttcaggtcgagagcccacagcgcatattcttgcttcgatgaagtcaggtatgttccactgacaacgaagtggccgttgataataccaccgtttgggaaacgcagtcccggcggggacgcttggctctgcatcggtcgttcgacaaggcgtccgtccggcaggcgcacctgtaactccagcttgacatcaaggaaattgtagttggagtatatcagcatagggcaacctggagattcagtgtcatcctgaatcggctcgtgttgatctcggtctggagctgaggatccaatttcggacacattcattcccactagtggagctacgacactgcgataagcgccgcagctccttcccaaggggctagtgttggtccacttgagactgcgtaggttgaaaacactgatttgttcgatgtagtgattggaactgtcctgtcctccgaccaccaccatctctgcacccccaaagccgtcaatatccacaccaagtgtaccttgatgagaggaggattcggggttattgtgaatggcggatagaggtgcactggcagatgtgaagcaagcgctcgatggcagtatcgtggcacagtgtgcgtagcgcccctgaggagattcatgggcagcaacacgagtccatgcccgcgttggtacatcaaagatgtgaatatctgacataaccacgacttccgattgtgactgcgattgcgattccgccgggttctcagggtcttttggcgtaggcgcaggtgacatgcctccataacaaaccaacttgttgtcccccaaagcacacacactgtggaagtatcgcggcggtggaacatctccagcgggctcaactttcgtccaatgtcgtcgaatcaagtccaactcataaaggttggaggtgagttggggacggctgcgtgagaggatccggcctccgaagacgtatagcttatcccccagtatggtcgtagtggcaccgacgagcggacggggttccttgccggtcgttcgccgcacgttgcacaccagaccagagaggttgataggaccagaagaaggatgctggttcagggacggagaggcccccggcgcagaatcctctcgtcctgtatcccccatgtaccccaaactcgactgacttcgcgacatcatggtgggcgggtttcctgtccgcttttcaacggagacaatcgtgtgggtagccgttgaccccctgtttcagttctcccaatatcgctcgcatgcgatgaggcgtttttctctcgaatgcgtctttctgggacaatgttcccggcgctgattgtaggtgtggtacggctcgaaatggtcgttgtggggagtcgaaaaagggggtggttccccgcgacgccgcaactttggctccaggctggcttcagaacgaggaaattgatgaataaaaactaggcagacagactaacgccgatcgtatcttagatgagcgcacagtcctggccgaagtgtcagccgtcgaggttggagatcggcacaaaaaatgtttaccgcttttgtgtctccccataactacccataactatagcaatccccccaaggaatgctcttaattcatgcatttactagggaataaatattttgtctgaatgaattttaattactttatgctttgtgatactttcccataggtccctttcgacaccgtttatcatgatcttgataccttttatcctcctgactccgggcatacgaagagagaacagaggtgaaggggaacaagaggtgacgaacttgcgaattcagacttgaacaccaaaaaggaagctgcacctgctcggaggaaaaggctggacgaagaagatgtactaactactactacattcacgccatgttgtgtaaaagcgctgatgtgcgcctctttgtatattggctttgtccttccaagtttaccctctcccctttctcataagtctatccattgccctcgcaattcaaccagatttgatggaatattgagaaacagttgagtactagttatagtgggttatagtgctccgaggcactcagaaacatcaatatcaacaataaagcccgatggaagtaaacctctggcgaacatgaggaatcgagggacgaatctattctcgcccaaggcttcgggcctcgaattgatttgatcgatctagaagacatagatgaaaacacagatgaagacttgggtgatgcttgtcaggtcatccgacactattccaggtatgatgatatcaaccagtttgtttcgaactgggcggcaggtggcttgataaacgttaatatctgtgattgaggaatgacaaggatgatcatatttatagcaaccactaagaaatgtccctggagaatatcgaaactataaaccaggcattgcatgctgttcaagcctgtgaactcttcacccagtcacttcattcgctccttgtcttactctgtgactgctagtggaaagtccatgtactctacggagtaccaaatatcacatgcccagccttaaataccatttacatattcaattaagcgagcatatgtcgttgtttgtctcatttgtgaatagtggcataaaccgaccgccctcaggatacctataagaaggtggccctgcccccagaacttcttcttcttttctttcttcttcagctctctttgcctctggcttagatcaagtgtnnnnnnnnnnnnnnnnnnnnnnnnnnnnnnnnnnnnnnnnnnnnnnnnnnnnnnnnnnnnnnnnnnnnnnnnnnnnnnnnnnnnnnnnnnnnnnnnnnnnnnnnnnnnnnnnnnnnnnnnnnnnnnnnnnnnnnnnnnnnnnnnnnnnnnnnnnnnnnnnnnnnnnnnnnnncatgattattctaatatttggacttcgcgacttggtctctgtgcttgcgcatgcctcgttgcactgtgtcattgggcttacactacccccgatcgacgcgaactccttttcatcaactgttcggcttgtccgggcgcttggagaagatgggatgtttagaatttacaacaacaatcattgttattgtagtggggatgacaccttctaccttctcttctagtagtcatcccatcgtgtgctcctctctagcaccctactactcccagagccgactttgctctcaccctgcttcgcaggcaggactgccggtacacctgccgcctcccttgcagggcccctcttcaatatctaataatccgttggatgcgactgaatctcaattaatttgatccaattaagcctttgacttacaaattgcttcaagcaaatatttacaaaatgcccaaacgtgtcactgagcactgccatatactacgctccatgatatagtactatccaaagaagtgaaagatagatctaggactactaggatagacagtctggaaatattgcaatacattgaaagagaaactatctgagaacctacgacttaaaaatctgagggcagggaaatgccacgtaatctctcagcaaattcttacaaaagcgcataattcaaaaggacggcgtaagtaggtttcattaatattgggaaactatgtcccaagatgaacccgcctcatatttctagcatcatatcataagacttcgtttactccttgagagtagtgaagcgaaggtaactataaggtattagtatcctcttttcggactgggagttggacaaggaaactcacggcttcacttcacggatctcgccgaacttcttcttggcatcctcggtgctaactgtaggtggcacaataacgtcatcgccagcctttgatcgagttagtaagatacttcgcaatagttccaggacctgggggacggggatcataccagccagttgatcggggtggtgacacctctcttatcagcggtctggagagagtcgacaacccggagaacctctgctgtgttacggccagtggaggcggggtaggccatgatcaggcggatcttcttggcggggtcgatgatgaacacggagcggatggtgaaggcaattcccttgctgtcgacgttggtcaagtcctgctcgtcaatcatctggtagaggaaggcgattttgcggtcggcatcggcgatgatagggaatttgagttgagtcgaggcgacttcgttgatgtccttgatccactcctcgtgggaatcaagcgcgttggcactctagagacagctgcgttagctaatgcttaagggttgtcaaccttggagcctcaccaatccaatcaacttgacaccacgctgggtgaactcgggctcgagcttggagaaggcgccgagctcagtggtgcagctattgattgtcagtacatgcttcacagaggtcaagagggctgggaactactgacactggtgtgaaatccgcagggtgagagaagagaatagtccacttgtcaccaatgaactcgtggaagtcgatctcgccctgggtggtgagagccttgaagttgggggcagtagagcccagacggaggctaacagacgatcagtattgtatgcatcttgaatatagaggtaggagcttacataggagcttcagccattgtgaatagatagatcggtcaaattgagttgtagatgaaagggagagaggaaagtaagatcgagttggcgagatacgaggttaataacatcccctccgggtttcccatagatacatggattgaccccaccttaacctcatctggctggttcctgtcccaccgcggcttcgttctggatggcgtgatcattgttccgcccggcagaacggccatgattggcgcatgcacggcagcacacagcgtgggctgtttagcgtgcgtgatgcaatatcaactgtggatgagcatttcgggttccttgggtttctttttacccctcaaccttacctaaccttatgttagaactacattacctacaatatacatacaacacactacatgcacggagtagctctactttgcaggtagggggcctgccaatatatcactactaccacgttattgtcttgctataccctttccttctagccattggcgcctaaatggaaaatggcaattttgactttcctataatcatcctatgggtggctcttattaggtacatatctacattggccattgtcataaccagagaagctcgatatagctgaacctgccagttttctggctgcgttgtaaccaactcgatcttatttcaagcaatcaaggaataggaatgaatcaatatgtgcaggctacctagcatggaacaattcctatctaatgtttctacatgaaaaacaacaaccttggaagtctgtactattgattgtgtaggccctaaactacattttaggaaccttgatagctagttatgtaccctctttcaagcttattcggccgacatgattttggtcaggaccaatagaaacccgaagtgatggcgcaatatcacctttacatgatgaatggtaccctgtcatcgaaaactcactatgaagtaaaatataccttgtacgtcaggacaagggaggcctaacacatgcaaatctgtatatcttctccacgccgattttaatccgacattctagacaattctgattcaataagtatttgacccacatacatatgtagtggggctaatcgaggcacatattataacatacatcatctgaaaatacgttcgtcttttgctgcctccaagtctaatattaccttcacactataacatcaccttgaagctatgatacagtacatttttccaaagtttgttttcattagaaaagagttggcttaaggtggcggaccaaacaatatatgtattcagctagtacgatcatctatatgaatagacttatagtgagcttaatggacactacatatatacaggttgaatctacacaataaatcttgatatctttatccacttctgtctcagtatgatcttagatgtttgattgacggcataaaataaatatagatttaaacttccggttgccattagagatactttcagagaggataagtattcggcgcgagttgcttactctagagtaggtagaatatatatcttcttcaaagcatttggaatagttctcaatatcaacatgtactgaccaaatctaaagtacactagtaatgcctcaaatgtcgatcagtcgcggtaactagcaattgaagggattctgagataatagtgatcgatgccttgataaccatcgaggttgtttacaaggagagctgtgtacttctaacggtttgtagtgccgatcatgatcgacccatcacgtgcgaccccagacccacatccgcgtcaagctcagtgccaaacattccaggaagctcctgcttaaactggatttgatagctttttcaacagttcgcgggatccttaccccattgattgtacagttctatttagttatactgcatttattgcacttactacgcttcctgcgtatattcgctgccttgcactgtcacttaatcagtgcaaaacaatcgaacagtcatgccacccaaacgcaagtctgaacgcgccgtgagcgcaaatgagtctgtttcaacgccttccaaacggcttcgaaataatgtagatgcaactccaacttctgcagctccagcttctgcagaatcggcttcggtggtaagcacattatgcaggggctgatcgtcgcgtcccatggcttctccactccaacggttgacatagcgctgacatgtgtggaataggttgatgttacaccccagactggagaaaagagaggccgtgggcgtccacgtaaaaatcccgagagctcggctcccaagcctatttctgatgcccctaaacgtggccgtggtcgtccacggaagattgtttctgagccagaacctgaggctgtagccccaacgggccccaagagaggccgtgggcgtccccgcaaggactcaggtatatatatacgatatgtggtgggtgatatatgctgacctgggactgtgttatcaggcgatgcgacacccatcacaccgaagatcaagaagaaggatggtcgtggaagaccccgcaagaaccctgtgccaaatgaagaagccgaaatcaccgagtctaaggtcgcgcctgcggccaatgtcattcctgaaactggccgctctttctggctgatgaaggccgagcctgaatctcgcctagaaaagggcaaggacgtgaagttttctattgatgacctggctgctgcagaagcacccgagccttgggatggtacgtcgaacctgtctcgaattctgcatccaggcgatcgctaacagttgaacaggtgtgcgcaaccatgttggtaggttttcctgtctaaagtcacggtagctttgaccacaagaatgatactcacagtcgaatagccaaaagtctcatgcgcaatatgaagaagggagactttgccttcttctaccactcgaactgcaaagtccctggagttgtgggagtgatggagattgtccaggagtattccactgatggtttgttgccctcgaaattacactgcttgatcatattgctgatcaacaacccatgacagagtccgctttcgatcccaagcacccatactacgacccgaagtccaagcgagaagacccaaagtgggtcgtcgtccacgttgaatatcgccgcaaacttgggaagcaagtcaccctccaggatctgaagtctcatggccagaccggaatgccgctcgagaatcttcaaatgattaagcaatcccggcttagtgtgtcttctgtgactccagcacaatggaaatacatactggagctggcaggcgaggaaccacaagaggagttcatcaggaaggagtgaaggaggaataggcatgagaaagcaagccgctacatgcaagcgatgcacagagagttttatctcgtataactctcccaagtattttctatcgacggcgttgtcggttgaacatgggttatctgcacaagcgaattgaagcgtattttatttgactcgatgtgtcctttataaatatgtgcaagggatagactcaccggaggagtccgcttctcttggatctattcgcaacagcagcaaggtcattgccatacaggctgatcgcattgctttgcagcttgaccattccccgatggccgacatcccagcagcccgatttggcacttgcgggatggtgtcatatcgctcttgtcactgatcgccctcacacatgtgtgccccaaattatccagtcgtccggaacaagctgggtcagaattgtctcaaacctttggaaacacccgtcggaccctggttaatgcatgcgtggtgacggatctagaaggcggtatcgggtatgtctataaaagtcaatattttccgccaccatatccgcactcagtcgatcaatatccttggcatccggcgcccagttcggagtcatggaacacggcctgagcatcccggagctatgacgctatgtatgtgcaggtctgcagctgtggggtactttaaacgttcgtgacaaaagaatagattggacctcccgaggtcgggctagtcatactttgtaagcagaaggggttggcccggggtctcatgaagaaacgaggggaatactcgccgaatgcgggctgccagccaatcagagagcgagattattgcaaatctaacaaaccaacggaggacggagactcggaagagtaagtctatccgggtggagcgtctttatcggcttatcaggcggggagctcttcgggcgacttggaactttttagccctaggggggtttcccctcctctattaaccccctctctccctctctccctctctcccctccatgtcccgtattcacctacgctttttgtacaaaggtccatcaactcttacttccttcatcgccccgcgtcgctcattccacagctcccccttcgtcatgtctgaactctcagtgtaccttactgccccaaatgggcgcaagtacaatcagcccatcggtctcttcatcaacaatgagtttgtggcttccaagtctggcgagaagcttgcttctgtgaacccttcgtatgtacccctctgaagtgtgttgtgtaactttgagtactgaccagatctccagcgatgaatctgagatcacgtcagtgtatgctggcggtgaggaggatgttgatatcgccgtccaggccgctcgcaaggccctcaaggacccctcctggaagctactgcccgccactgagcgtggtgtcttgatttccaggttggcggacttgattgagcagcacaaggagactctggccaccatcgagacttgggataatggtgagtaaagtgagcgattgactatcaagataagaactgacatctattataggcaagccgtatcaggtctctttgaatgacgatatcggtgaggtcaccaacactctccgctattatgctggctgggccgacaaggtgtatggtcagaccattggtactaccccggccaaattcgcctacaccctccgccagcctattggcgttattggccagatcatcccttggaactaccccctagcgatggcagcatggaagttgggccccgcgcttgcgtgcggtaacactatcgttctcaagcccgccgagcaaaccccgctcagcattttgtacttggccagtcttatcaaggaggcaggtttcccccccggtgttattaacgttgtcaacggccatggtcgtgttgctggtggtgcgttggtcacccaccccggtgttgataaggtcgccttcactggttccaccatcaccggccgtgagatcatgaagatggccgcaggcaccctgaagaacgttacccttgagactggcggcaagtcgccactggtcgtctttgaggatgcggacctcgagcaggccgccaagtgggcacacactggtatcatgtacaaccagggtcaggtctgcactgcgacatcgcgaatccttgtgcacggatctgtatacaacaaattcgttgagcttttcaagcacaccgtccacaccaccagcaaggtcggcgaccccttccacgatgacaccttccagggccctcagatcaccaaggcccagtatgaccgggtccttgaatacatcgaggccggcaaggctgagggtgccacgctcgcttccggcggtgtggcgcacaagaacgtcggtgatggacgtggtttcttcgtcgagcctactatcttcaccaacgtcactgactcgatgcgcatctcccgcgaggaggtgttcggtcccttcgttactatcgctagcttcaccacggaggaagaggccgtcagccgtgctaacgacaccacatacggcctcggcgccgcagtctttactcgggacattgagcgcgcccaccgtgttgccgccgatatcgaggctggtatggtctggatcaacagcagcaacgacagtgatttccgcgtgccgttcggtggtgtcaagcagagtggtatcggtcgcgagctcggcgaggctggcttggacgcgtactcgcagatcaaggccgtgcatgtgaacatgggcaccaagttgtaagctgtttatatcaatgaggaatggatctcttccattgcacataagttgatttgtcataagttgatctgtatataatgaccgaaccttttgttctcatccctgcaaaacgcaaacactgtatatctatttgatcttgttcctatgtagccccacagatctcgacgggccaacgtcaatctcatgtatcgcctccacttctcgcttttgctcagatacccgcaaaaaggggaaaaaggaaaaaaagcaagatcgaactactgagtgcacagcccaggtaaagttacttctcgtcatgcagatcaggccctgcaccgtgcagtgacatgacggcaagtggttgtcccgtgcgcaatcaggagaaaaaggaaggggaaacctcaactctcacaggctctatgtatgtccatcaccttcgcgttagacaactggacttgcacaattgatgcccaacttcttccgcccgtagctgcgatgatgcaagccttatctgcatgcaagccttacctggaccatatggggcatggtgcatttgaggattgtactgagccgttgaagctgattggtcgaacgatgcttactttgtataggttcacctcggttattgaccccgtactagtaactagcgaactaactagttaactataccatctctccctcgatctgattatcagttcatattgaaaaaggtggatccaacacaacccaattcccacctctccatctatccctgcatgacccatcacgccctaaaatcaaggtgatacaagccggctgcaggcacattctcgcagacatgcatggcacggatggaaattgcaaggcgggaatgtttttttttttttttgcaacgcggtatttgggcgcaaatctcgagtcaggcaggaaaagggccagattactcttcgaactctgggattggtagtcaagagtaagtgcaggttccaggtccaggtcttagcgcccaccagcacacacatgcatgaatctcttgcatctgcatgcagagtcggtcatgtgaaaagccacctggcgccggtctggaaggtgatctgacggtactttttgacgggtacttgctatcatgattgagttctcgagccccgaactctatgtatggcttggcggctagctgcacgaattgatgcagaagagaaagtttacgcatagtatccgtagttcatgggtatttcagagttcagagctctggtgtgatgattcgcattgcagacacgggattcctgcaggagattcaatagcgcgtgggattggagagtttgggattcaattcaattgccgaacggacttggatccctgcagctgtcctacaagttcgctcgaaaggaaaaagaaaagcaggatagcatcttccagatccaagaggcacggagtacggtgtaccagtgacaacatgtagtaaaagtgggatagtaagccctcgtgggggtggcttggcatatcccacttctcatcctccatctccttgataatattccctcttcgatatatctctgtgaacagtataatcgtaagtacggtgacaacctagattccactcgaatcacgcttgcacacgaataacccgtttaatgagcctgacatctctcagttcccaaatagcggtgtccactccatcaccgatcggcatgtctgaaattcagaggtggacggtcaacgaagtcagtattccatgcggttcgccatttgattcgctctttttgattatttcttttttctcgctctcctctggttctcgtgtcggtcagacgtgacgattatcctcccgagcgtatcacagaacaggaaaaaagaaaaaagaaaaagaaatctacgccaatcacagacaactaactcgactagccgtatctcgacatcccaggaacgctgctcgaagggccctttcacgatgtggccaaaaacgagttccggtttgtggatatctgggatcacaaactatatcgcctcgatctgacaaagggccctgactccttgacggccattgatactgacgccgctgttgggtgggttcccaaccgttctggaaatcaactaaaaattcacttttgctgacggggaaaaccacgtgggacttttagcgtcaccgccaatattgccaactcatccaatcagctgattgtgggagccaaacatggattcgcccggctggaccagactaccgggaacctctcctatatccacggtattcgtgaactttggggcgaagatgaggggaaagcagagaggtaagggtttgaaaaagaaaaaaaagaaaagaatccacagctacatcgaagaacgtcgactaacattaaccccaattgttacaaaatataggatgcgtttcaatgatggtgccgtggacagccacggccggttctgggccggggccatgaacgacccaaagatcaagaagccggaagcagaaggggtcctattcagactggatccagatcagagtgtgcaccacatgctggcaccggtgacgatccccaacgggatcgggtggaatctagccgacgacgtgatgtacctgacggattcaccgacaggcaagatctttgcctttgactttgacgcttccaccggcgcgatcagcaaccgccgagtgcacttcgatatcggcaatgcgctagagccggatggctttgccattgatgtcgagggctgcatctggagcgctgtctacggcggcggaaaggtcctgcgaatttccccggccggaaaggttatcggtcagatcgatctgccgacgcgcaacgtgacctgtccagcctttgtcggcacagagctgtttatcactactgccaaggatgatcgtgatgatgaccggctgccgcagtcggttaggtacggcggccgggttttcagggttgatgtcggggtccgcggcgtgcctaagaatgagtttcggttccaggactagggtgtatcgtgtgcatcagacatccttggatacgtagctgcatagtacatggtactccgtacttcgtacatacatagcacatacatactgccgggatggtacatgcttagttcgatttggtatattcttattctactccatacctcggcatccaatgcgacgtgtatccgtgcaacgtagagcagaaggatcaattgcgcatcactagtactttgcacgtccccaaaaaattagatccaaaaggcggtattggtagctaacccaaagaaaaaaaaaaaaacacagacgacaattcttatgcagcgtgaagctgggtggatcgaggatcagcaaacgggcgagcacgtcggtccgcgctgtcattgtccggaaacctgggtctgggtagtcttccactgcaggccacgcaagggacacaaacccaggtttatagatcgaatcggcgttcgcatttccatctcacatcctgtcgaccatatactccatacgtacatgcaattgttaatataggacttggccttgattcccctggtttccgttcggtttcgaactcggctagatttcggtcgaggctaggtagcgcgtgggcaccagcactgccacctcttttttttttctctggcggggcccgccctgcagggcggaggcacgaagtgataggtggtgtatcgcaatgtgctgtgctttttttccgctgttttcggactatgtgggtgtgttgatccgaagggggaacatctaccgtacctgtcagcgggagatatgccaatctagatccgacaaagctattcttctgctttttcagggaaaatgcggttgcagcggacacgagataatcggagatccgtgcggtgaggccgaagcagatcataaaaaggggggacagcgttatccacttccgaagtgcagagtcaacacctgaatttcggaaaagaaaaaggaaaagaaaaagaaaaagaatcgggttctcgatgaatccagtctaatggattccggatctttttaacttctccggctctgcacaattcaaatagttcgatgtcacgcatcccgaaggcatgtcggggataaccagactcaatggtctggggacggcggtttgagattgtcagccacaagttgacagagagcacagccctactccatacggagtaaggagcagaacgaagagaaacgtggaattcgcttccaaattctctggggaacatctaagccctgttcgatccaaccagtcagaaccactggatctatcagaccgcaattgtctgtcgaatatgcatgattcgcccgaaaaaaagaaaagaaagaaaaagcaaaggaacaatagcggggactctgctgcagcaaaagactgacagctcctctaaccctgtcggaagcgacctcggcacttggacattgccaacacatcgaaagaaaatatatcatacgttgtccgtacagctttacccacttgtaggagtcggaagatggaaccccatattggaatgcgtggagatcatggcgtcttctcggacaatgcttcaatatctcggcaagatcaagccaaaacgcaagtgccaagaagaggcgcttcagctgtggcagcgccagctcgcctatctcataaaatcatgaaagcaatttattttccattcgaagaatccactttggtgcagtgcgtccagactacggagtacgaagtcgacactaaagcgatctccactgcttatttgagggtcgccacgcggagtctttatcccgtgacctcggacaagctcgacagcctccgggaatagagctatccacacgggtttctcatgcagctcatgcggctagtggaatcctggccggatccctttccgcttggtccgatcgtggagcgtcaaatcggttgtgatagagaagaggtgtgtcccctggttgctgtttacctttctgtttatttactttcgggttccaaattacatcatttttcagcggactatcaatgtcacaccaaggggtgaaacgaagtgggttttaagttgtctcgtctggtgtctgttctctgcgttaccctgttccatgacgtcaagtagataccaagttatagattgtacaaaccttgacctcgaaacttcaaaggcacggaactctgccagataccaacggtcaacggcaacggccctttaaccgggacacggggaggatttggtgatgcacaacatgcatgtattataaactttgcgagaacatcctttcttcctttctgcctgtgtactttttttatatcccaccctttctatctagattaatagtatctcgggaatttagtctctccaagcaccaaactctcggaaattgacaggacggcttactaggcttaccaggcaactattggggattgcctgactaactatacccgagtgggtatagatcggacaggtggaaaatggagtagttcggcgtttctcttttacttatattgccatgcgtcatccgttgactcccagagaagagaaaaggaaccttctaggtcccccatacattgccatccatggatactatcctccactaacgcccttctacccgtggacgcttcaaacctaccacacttgactccctgaaaatcccaaaggaattaatgaataaatcgaaagaggcaaaaaccaaaattaaaaaaaacaaataaaaaaaaaaggtctccacctgtccctgtccatgtccatggtgacggcgcacacttgcagctcccgatgattcgtgctgtgcatgacgatcgctttccccgggtgcttaggtcctttcctagatgtgactaggggaggatgactctatagctggatccggtaatggcctataatagggggtgatatcggtcactctgacagattgacagattggacgtattctatatctacttcaatattgattttgatttgatttgttttgattttcctttctttttctattttagcatggcaattattattaaaaaccaaaaccaaaaataaaaaggcccaaaaacaaaaataacaaaaataataaaataagcccaatactccgggggttggaggtctccataggagatgcccaactatccgccagactgggtcggacaagagacaactaagttgtcttggagccatccagaccaggtgatggatcattctctcaccgctgcgaattccaacggttgttcttaagcttgccccattttccaatttcctcactttccctgactttgtcgcttttgtcactttgcctagcttttattaagggcctcggatcttttccccatctttctagcttccttagcttccttgtattgattatctctcctcgatcctcaattgagtgaatcgagtctcttgttctatatatccctctcactgtcttcatcgtggcggccttaggaatcagtgtgttgactgcaccgtattcgggctcacattccctcaacctgtcactctattcagatcgatatccatcgccgtcaccctccctctctcatactcctcgagaacccagcgacgaggagagaggggggttccggtcatgccctaactcccgccccgtcgtgggagatttgctttctatgtcgcaggattctcgacgtgctggttcattgtccagagatgtgacgcaaactgatgaccgtggaagtgacaatgatcgtaccttcaaccgcaatcctacccgccggccacctcaacgacctcggccccagtcatggcatccatacggacccgtggagccaccactggaatccatgtcgtcccgacccattggcgttcatgccatcttgaatcatccacaagcaacaactgacctggccggccgtgagccactgagcctaccgggtccatcatcctcacctcgtccccaagggacctcgcccataatccgttcaggatatgcattgacgtcgcagccgctatctccttactcacggcctctgatgaatccagcatcgccttcggcgcggtttgtcggcgggggcggcagggcttctggtcagtctagtgtcgcccagtcaccactacttcctcatgaacctttgatgggcccacgcctacccgtcactagttcgcctttgcccatggagacgggcctacgctcaatagcacctctcactagcactcagcctccctcgctgcattctaccagtatgcattccaggcgaattagtgccggcccggggcctctcagcaacctgaaatcccaagaaacgagtcctatcacgtctcattcaactttcaatcactttggccatgcatccccagcagtgaccagtgtctccctcgcacaaagcaccgcatcatatcctactgcgcctcaatatatgacattggaccctgtggttcgaaccgtctccgcaacaaaaggccccagacgccaacctgagcaacaccccacccgagccggaacaccacaggatagttcccttccactgggcatgataccatgcgtactagacatgcgatccggctcctccagccaagccgaaaagcgcaaagctaacagcgacgcatcacgacggttccgcaatcgcaagcgcaacgaaatgcaactggagcagcggctcaccgcacagcaggacgagatccagcgcaatgtagaaaccgtccgtcgtcagagcgaagagatccgcttcctcgtccagcaacgagaccactaccgctccgaacgagacttctaccgcgaccaactcggccgcacaatgtctctgagcgccttaccccccaggccctcctctccacgctccgcccaaccaaccctcctccctgcatcagaaccgggcaccacgacatcgtggtcgggcgtcgatgctgcccgatccgctttaggcacacagccgacttccaatccgccccagggaaggatgctcgaatcagttcagtctcaacctacttggcctgcaagtcctccgtattcttcaacccccattgcatccgccggacgggcggttgctggcccgcattcccggtcgccgtcgctatctgggggccaactgcctccgctgcagggatcgtggtcacgtccttgatttgagtttgccggctgccgaatcaagcgacaattattatttctttcattcttgtcttttttccccttttccttacactcttaatcatcctctctcttgtgtatgccactgctaccaggagagacaaacaagcggtcactggcatggccgctcgcaggtggtctacactcctttagtgaggtggtctactcaaaagtgcctcttcctttaggctgggtgtgtataactatctgcatttcttcctgtcctcatcaaaagactcgtctggttctgcaaaagtgcaatttatacttctctgtattcgctgtcattatattaccctgtcttacttcctcatcctgtccctctgctttgattattctcgctctctctttgtgtatggattgcacagcggtgatacctccatcggcgatgtattaaatcatcatttttgattgaagttggaagatatttgaaaactggaaagcccaatatgacagtttttaccacttaattgttgaaatccgacctaaacctcgtaataccaccatctgaggactcaatcgccgaagctgtctagacgtatctaggaaacgcttggatcgaggtcttaaaaagcttagcttgccatgtaactttgagacatacaatactaggaagtgattggtctatgggtaacacaggctaaggtagcacaaggtggttcatacgacatcataaacacatttagaatctatcaggcaggccgtagataatatatacaggtgctactctagttctaaatatctctatggtcttgatctagttatgaaattattcatgattaataataatggagtacaacttagtaattatctgattggtccgtgaagttccggtggaagcccttcttccaccggaagttcctccactcaccgaaatctccaagcagttaagattccagacgacactcagcacagccaattatcgccaagaaaacttctcggatcctcgaaatgcggggccccgagtttccccacggatgacgggtctttctcgtattcctctcatattaaggcaatcctcacagtaactacaacatacaaagtcgggctaagaagaaaacaacatcatcataagagtggattgcagtccaaactccagtgcgaaaccgttcacgtgttgtcgcagtcgagttcttttaacactgtccccaatcaaggtaaatttttccgagttccgagagaggagctactctagaggttccctagcgctaatccctttagcagcaaacggaggaagcgaccggggtccgttccgatggatctgccatcctctcttactcttctggaggccttctccaatgccgaggatgtagaccggttgaacgggagccaggttgatctaggtaggaacacttccgtcaagcatatccccaatccccgcatcgtcgctgacgtctctagatgccttcggacagttcatcgcatcggggaggaagccgatatctcaaccacatatgaccttgacgaaccacgtgccccagacatatcccttagacagttatcttacgacgatcaatgagctgctctcgccgccgaccccggatctgattctaggggagtacaatcagccctttgaactgcagcgaaccttcgaaactcggcttccgaatctctctgaagaaagtaaaagttatctacacttgaaaggagctctcaggatagttcccgtcgacctccggaatgagttgctgggggcttatatcaaatatgtccatcctctcctgcctgtcattgatctgcaatggtttttatcaagtgtcatggtcgaggatgaatcccgatttccgagcccgcttcttcatcaagctgtcatgttggctggcagtgcatttattgagcaggaagctgccgtcaaagccgggttctcgtcacggaaagcactgcgaaggacattattcgggcgagccaaggtgagattgagaaagacagaatccatgacaagtcaggactaatctcgactctatcatcagcttctttatgaattcgagaccgaaccagacgcatacacccagatccaagcattattgcttatgatgcagtggcatggaagtggagttggccacaaaatcccaacatactggtttgatctcgcgtattccacagcagagcgcgtcggtctccttgggagtctagaaacaggtagtttttctcacaagcacagactatggtggtgtctctatgtgcgcgaccgcattctctccctcggtttccgtcgaccactacgaatcccaaacagcgatgtcacaatgtccctactggaatctacgagatactattcctccgagccctaccacgacctcgtcctagttatgctgggagaagcagccgccatgctcaactgggaaaaccaagagcggatgatgcttctattcatccaggagattaagcttgctcattgcgtgggcgtcattatcaatcttctgtatcaagatgcttggtcgccgtcgccgtcgggggactataaatacgccatggtacccaagtcgaatgtgccacaggctgctataactgaatgcgaacagcttctgaagacctggattgaggaccttcctgccccggcccattatttctccccgtcacttctgcacggttgccataccgagtctccggagattgtcctcctcgttcaccaagcgttcctctatctcctccatctcactacaatgtcagtactctaccaagatgcgtcgagccgaggagatggtcttcagacgacccttatatcggaaatgagaggcctgacttcgcaagtcaacgagattctcaatgagctacatgactgcaggatacttcattttctccctggaagcactattactatactgattattattctggaggcaagccttcctgacctgaaggtttcggatgatattgtgaggatgcaggccatgtcgaacttgtatgcctgcgaggaagcggctgggtatttactacaaacatatcctgcggctgagattgttctgtcacgggcgcagaatgctcgtgggcatctcttgggtttgaccgcaacttgattgcggagcgaagcgaagcaattacacgatttaaaaagcatttagtcattttagcgtacacagaatgaaaccaaccaagatactattatttccagggcgcgatatccgtacctcctgtctgagatttcagtaccgccccttcctaattaggtgcaaccaagaatactgccatatattctgcctaattcttgtctacatggtgaaagaacatgcattattcctatatgattcaaccccctgatgataaagcagttgatgaagcagttgtacctataggatacgatatgacaggagtgacctacttctattaggagtttacatacaaattgtaggtacctgctgtcttactacttttaacacaagagcggtgtaaagtcagaaggcggtgtacatgatctatacccaattaggaaggtacgcctaaattctcaggcagggggtacgaatgttagttatccaaaggggggtatcccgaaattgcggggaccccggttgtgaccccggtgacacccgttttgaattggctaaagcaccatctcgctatattcatggagcaaaagactagtgtggtgccaaagccaccccgtacatcgcgagaatgtgatagatgtctcagccagaaactcaaggtagatcccttcataacactcctggtttgaaactatggttctgacagtgttcgcatagtgtgacggcgcacatccatgtgtgctttgcactcgcgccggggataaatgcgagacatcccagcgcagagtgagacggacccgcggacaaaatccaaggggcagacgtcgacatatgaattctggagtacacagagcaatcgcaccagcgccacccaaagattctaactcgatccatggtgctggagtagctgaaatagcttctgccccagagagctcaacctcctgtccggaacgcctttcgaaagagctgcctcctggtgctaatgcctcctatccggaacgctctccggaagagctgcagtctggtgctaatggtttcgcgattgacttcgccagacaagtctttaacgaggaagaggctggccggactctgaccggtgcatcgatccctatccctgatgatacggaagctcctacgttggacaactcattatggcatcatccgacagaggtagagcttcccccggaggccgtgatattagccttggttgacgtctatttcgaccgtatgcaatggtttatcttgctgcttcacgagccctcgttccggcagactgcacgcaggataacttcccagactgtttggagacgccaagatctcagtactaccatgcttgtcctggcagtggctatgattgggctgcattcggtcttaccagatgatagatggcctgggcacgaattgttgcgagaatactccgttgatggggagaagttgatgcactatttgaacaatgagatacaacggaatctacttgatatctcaatcgattgtcgaatcgaagctgtccaggtttgcctcctggtttcctcctattatatttaccatagatcgccgagtcttgcttggactgtctctggtatgggtgtgaggtctgccaatgcccttcatctttatacaaaatcagtccaatatgaaagtccagttgtggatgaaattcgctctcgttgttggaatcatgctatttccagcgacacgtttgcgtctgtcgtctatgggcgaccttgctctatcgacactgagcttgtcgctttgcattcgcctagagaaatggacgacctagccattgatccacttctgctggaaaacgaatggatatttggcgatgggatgccaaaaacgacagctggatttttcgctatgaaatatgagatctacaacatcattcgagacatactttcacggtttcgtcgtcttcaattgagaaaagagacaatagaagaggaccttctggcaattgtggaagctgcacaagactcagaggaacaattagtttcctggcggaaaagggttcctcggctattcgatttcgagttttggagctgtgacaatcgcttagagcagttccaacggcaaatcgaaatgttaccgcaacgcactaaatatcaagcagaaacaatcatcttacaggcggcaatactccaactaacatacgatggagctctgatacaagcccatcgacctttacttgagcagaaaatcactagttcttgctcgcgcttggtggtagacgcaatccacgagtcgttccgggtggccactgcagctgcgctacgaatatctcacattccggtcctccgtttcaagcatcatttcgccgaatccttcgcctccctacagcaatttactgcaggagtgatcctttgcatcctgccaacctgtcaaccttttacttcagctgcacacgaggccaaggctggaatcatacgtattatccatgctagctcagctttcgggccccgcaatcgcattgccaagcagaccgtacagcttctgacagagttgctgaaagtaactgtcgatcgagagatgtccagcgccttgagacgcggggtggaaacaattattcccaggcgtatatctgagaggggttccattctgaatgcgcagccgcgtatagaccatacaaggagtgattcactatcctcgcgagatacctccctcgatcagtcttcaacgtcaacaagtcacgcactgccccaggcaatacacgaccatagtagggtaaacgaccgaatagcccaagcacccgtcaaaccgcctgaatacccgtctgccaatatcttcgaacaacttgacgatacattcgctgcctttggtgagcgtgagtggagccgaggtgcgatcagtgagcatggcttctaactaacgcgttaataggcatgttcaacttgatatctgatgatcaaagtagtgcttggaattggggccgtacggtcccataacagaggatcaaaattgtataaacaggcggagttgatataacagctggtctacagaattgacggttgtgagggctagcagggctaggatgggcctgagcaagtggtttaaaagggccatgaatagagggagaaggatgtgaaaacaagccaggagaaaaggctttcttggtccatattgtttgttttggctttggaggattagagagacttggctgttacaatactgaggaagtacggtccttggaattggggagaataacgaatggttgctatagatatcttgaaggggagttttatgctaaatacagtctctagaagctcttttatcgccaaatcaaagagaagctacactatcaaatagtctgaggagcgctaagcacatggcgtgatagtctgtttggtaactataactgtccaatgtcactgaagaaatagaactgaattttatacatccctcttttctcctagacgtaagttgaagtaaagtggcagggtgcatacttacactacgaagagagcccaaaatggttgtattaaacatcatgtagtgtaacaaatgtatttcaaacttaccttctataactaatcttggaactatatactttttctttgttgtgacgttgcttgtcttctacatatcacatcttttaagtgcagtcggttttccacattaggctgtttgctatatgtgtggtactataagacgaggccactcctattgctcaggcaatgtttgccagacctctctttgcccctattctacctgattccgtgtctccataaaattaccttagaaacttcttggcaatgagagatctacaaatctaccatgtctatcggtcagactacctcctttctaggcagactgttctagatacttacgagtctatgcgagtgaaactcaacctatgcttaggatccacttgtggacaagtagactacaaagaggaagaaacataagggcatgaacttcacattacgcaaccatagctgagaaagatgcgagaaaaaatagcacacaagaaaaacatggtatgagatacggaaactcagccggaagacaaaatccagaaaacccatatcaagatatcaataaactaagcctcatgagaataacaaaatgctatttcaacgcttgtagtagaaagaaagaaaatgccatcggcacgcaattccattctaggaatgcgcttagagggcgaaagcagcgatgacaccggccatgacggcaccgaagctgatggcgttgcggccagcgctgttgaagacgggggtggccgaaggagaagcggtggggacagcgctggtggtgagacggatggaggtcaagggggtgctggtggggggcttgacgggagaaacaccagtgggggtgaccttgggggcgggggtagtggcgaaagtagtagcaacagtggtggcggcggtggtggcagcggcagtagtctcagtctcggggcagatagtggtggtgatctcggtgctctcgataacggtggacgcagcaaccggggtggaggcggaagcggtggtctcagtggtggagctagcgacggcgctggagctggagacaacagcggcggagataccgaactgggtggagtactggtactggccggtaccctcaacaacgagaagcagaccgtagtgggtgacgtcggcctccaagtcagcgctaggagtccagctgaactcgccgctgttggggatggactcggcaagagtctcgagggggaggacgttggtggagggaccgcgcagaagaatgagggagatagggccaacagtggtgggagtccacttgatggtgtaggccttgccctcgggcacgatctcattcagaccagggtaggtgatggcattgccgctgggctgctggttgtaatcaggagcagtgtaggcagcagccagagccacgaaggcagagaaagcggtggcgatagtgaaacgcatgatgtagtgtcgagattgacaaagagtgactggggtgagggtaaaagaatgactatcgttgaagaacgaaaaaaatgattgtgagtggaatggagagaagaggaagaaagaaagcgagaaggaggggagatgaactactttgtacatttctagtttggaggtgcatgcaaaagtggggccgacattaaaagcccccaaaaccaaaagatcgcgcagaccaaccatatcgcatctcatttcggctacattttactttgtgtggctggacttgtattgtaaatacctatcacactgacgctataccgtcatcctgttgtatcatctgcggtctcgtgcccaattatgcagcatcttgtcctcgtggggcatgcgggccggctgtggctcagatgttattagaacaattatgtataatatcatgctgtacgtgacgggtcaagtaccatcagaaccaggtaccgtttctaattggtgggtcccccggaagttaattttatccctaataacggccgacccttaatgtagagaatgttccggtagggaagattaaaaataccactagactgggtctaaggaagaagtattaaaaagcattggaaagtattcacaagcatccacaagtattaatgaaataggaatgagggcatatgagacaaagacagggtaaggggagtctctgttgacatatttgtttacctttttaaggcttacaaggttccaaggttctgccaataccaacccgtggaacccttggcgaccaaaaccttcgaagatgacccgacgataacccacggtagccatagcccttccgaacatcttatatatatgtagctattgtagacatgtttgtactataagcaatcaaatgcatatacttctcaaattgcaaggcatttatgatcctcatttccaccgtgtttaggaaaagaggaatcgctaaatcttcggagattgcaagcttacgagattgcgccctcaagcctgggcccaatgacaggcgtcgtacgggtattgtaccatacagccgcacagggcgctgtgccttgcaggtaccatgtgtcctttctacgggggaaacaagatttcaaactgaacctgcagggtaagattctgatattcactgatgttcactgatattcacgattatcacgtcaatcgcaacataactccacaccgataggcccgtgccatatcaaaaactacatacaatcgccgatcacaccagttcattattagggttgtgatgtctatgggaaggatcaacttgatattcaggggtcgaagttgaccagcttgtatagagtgatacatagtatcctatgttgtttacatattgtaatccttcatttcctactaagacatgtaagaatgaaaaatcaaaatacgaataaagaatggatttgtctcacctggcaattcgcggtgatttgctacgttcctgtgcctgaatttagggtgggacttgtgccaagcatcttcgccgcaactatcgaggtttgaatgtttcttaaccgggtctcaggctggaatcccaccacattaggtctattcataggctcagcccttcgcttaatacgagacgggaatttttagctttcgtctgagggggaaatgtgaatcacatgacgttcagcctcatggcaaaagtgggagccaaaaataaaaaacgaagagaaaaaaaaaaccaaaataccaaaacatctcatagactagtcatatactacttcgtatgctgcacgcccgatgcaacatgaatcacacatcgagccattcaaccccgggtacccggaccccttctgtacaactagcacctcgaggcgacgtgaagtgcttgtcattggctgcattgacaaggttcggatccaagccaactaaaccccaacttggctccaaacaagccccgaccaagccctgtcagaacaatcagggaaaccttcgcccgtggcggcccaatctcaccggggaccaagcggacctaaaatggggccgaatcgaacaggtctgctatgcacctatgagtctacctctactcttcccaagtgacagtcttagtctggaggaattcgtcgaatccagcaattcctccgaagcgaccaaagccgctgctcttccatcctccgtggggaaggacagcctcgtcgtggacagtcatagaattgatatgaacggctctaaaaaaaagacccaaagttagcctcaattcaatctccacccggggatgtgatctgtattcggaactcaaaaacccacccagagtcaatttgcttagccacccgtaatccgcggaacaggttgttggtgtacagagccgcagtcagaccgtattcggtgtcattggccagtgcaatcgcttcgtcctcggtgtccaccaccatgaacgacacggtcggaccgaacgactcggtcgcgtacaagtccatctccttggtgacaccgtcgacgacgatcggccgcatacctgcgttggtggattcgcttgtattaaggtcgccatacagcagcttagctccctgagacacggcgtccgccacaagcttcttgttcttggcgacggccgcggcgttgacgagaactagcgcgggcgcgtccttgccgaacaacttctcagtcgtctcggtaagtttctgtcggaacgcatctgcgatcgagcgctgcacgacaatccgctcggtcgccatgcagacctgaccgccctgtgtattgtgtcagtgtgatatcattgtctcgaatgaacattacgtacgtgcatgaaggatccaatggcacagttcatggcagccctatccaagttcgcatcgtccaaaacaatcgcggacgccttaccgccgagctcgagaagcacaggcttaatgtgtttgcccgcgagagaagcgataatcgagccgactcctgtgctaccggtgaagttcaccttgcgcacagcctggtgggcgatgagcgcgttggtgacggccggggcgtcggagggctggtgaaagatgacattcagacatccggcgggaagaccggcctggcggaagatgtcgcccagaacccagaaacacttgggtgagagctccgagcccttgagaacgacggtgtttccagccgcaagagggagtgcaatggcgcgcatacccaggatgtaaggaccattcctacatcaattaagttgagttggggccagctgataaagcgcagtataccagagatcggaagcttaccatggcgcaattgacagaatcactccgtacggctccttgtatacgatgactcccatgtccttcccggcgacattcggtacgataccctcgatcgtggatatccggcccgcgaaatccttgatgaagttcaaacccatattgaaagtgatctctatgaaaggccggccggcaccggtctcctcgcgctggtactggatcagttcctctttgcgtgagaccatgatgtcagcggctttcaacaggatgtcgcggcgctcggctggcttggtctttctccacgagagaaaggcggcttgggcactgtcgactgcgcggttggcattgtcgaccgacacgccgtagcaatagccactcagctcgccggtagccggggcatgaacctcgaatttgatatcggtctcaatggactcattattgatgataagcggggtcaccgccttattagattgcgccattgtacgttgaggagttgaagaaggatattacgaaggataatagggggggatatctctttaatacagaaagggagtgtcttttcgaatagaggggctgagctgactttccagcagctctgatcttaaccaaatagagtggcgggggttggtggggacacgaaggaggtaagactctgataggtcacggtttcattgaacgtagatcgattatgtcggtctgggctcacagtcagcagtaagcttattcaacggtttaagaagttatctccggtgatgtcaaccccaaagcctataataacatgccgatctcggagttaccggggggggggggaagaaaagatgacaaagcagagatgcagtgagatggagatgagatgaacgacatgacatggctttttgaattattcagcgtctatgatcaaaaggtatatccaaaaacacattcttcccgagtccagccctatcaccatgatcccatatccccatgcgcctgaaagatgcgaattgtgacctgcacaaataatacaagccgtgccctcaattggcccaaatcttcgtctcggtcgaattgctgcccttggccatctctgcgaagggacacgccgatcccttcggcgcagtggacgcgctttgtatggacggcgccacactgtgtatggaaggcgccacaccatctatagagggcgctataccgctagaaatactggaccggtcatcctcggtcgagctaccggagctgctgccgagaatgcgcttttcgccgagatatccctcctgatcctcggtatagttgaacatggacatctcgtcggcgaactcttcaccgtcgctagagtgataccgggcgaagagatcgttctggatccagaggatcttgttgacggcgcgcacgagcgcgatcttgcgtcgcagcgacaggtgtgggtgggatagcatggcttcgatccagatatcttggatgtagcccaggcatacgccgaggtgaatgtactcgatgttgagaggtgttctgcgtacttgtccgctgtgcatcatgctgtgttacacatcaggttagcgttgcacgataatctcaccccggggacggggatctgggaacggatagggctgaacttacccaactttgttcaagtaccgccagaattccattgttgtcgggtcctggcatagacgcgtcaggtaccagcgcaggaacagcttgcggcgctgaattttcggtgtgtcttcctggaggtagccctcctcgggttcggtctcgtcgactgttgtccgtgtgtggaaggcgcgggatgtgatgtcatattggagaatcttcttatataccaggttgacgactgccgggatcaattgtttgatgtatttgttgccagagagcagtgcttcgatatcgcctgaagggaatgacgttagtggctgactcaagggtggtccatggtaaaagcttactagagttgaagtcgaggaagctatggaggtacttgattcgctcttccaagcttgtatagagcagtttccggtcgacatgcattggcgcaccagccgatcctgatcctgatctgaaatccatggcttctgacactttattatgttgcgaacagctggggtcttccttgtcggggtggggaaaacggttggaaaggtagatcgagagtatgaaggagaagataaaactggagcacctcgtggcaagctggcggatcgagtatttataccatcgatgcgcgatctccgttcaagattactccgttcaccgttctcctatattggatgcaacacgattaaattgaaagccactaaactataaaacacatcctgttgggctccgctccaaggaatcctggaaggggacgatccatgactcttacccagaaaagcgacattacccgatctcaggcgagctttttccctaaaaacttcgattgaagacccaagtaaagtgctgatcgaatcagaccatagggcgagatgacttagtgactctctaaagtggagtaatcatctatttgtaggaatgtgtgggctgattcctgcaatctccgaactagacgaaaaagcgaaaaaagcgaaaaagcgaaaaaagcaaaactgcacagccaagaacggcaagatccatgggtgccgtgctatcagactcggcaacctgaaacaagcgactaggaatgtcgagaatactgtaggctcaactctaaccagccggtgaggaagctgtcagatgctagtataccagatggcgtttttagcatgccggggatataaaacactaaagtcacccatgttcaactgtcgcgaaccattgcccgtgcaaagcgaattaatgcgattaaatggatgaatcggcatttgaatctgactcttgttcactggctccggaactccgctacgggctaaacggtttctcttaggacccgtgatgaagtgggttccgttcgggtccgacggggttgcggacctggtgatgctattcgtgttgtctcagactgttgggtacatataaatacgtggtagacatgcatcgatcgtccgttgattgccttggaaatcgagcgttgcatcaactgcagtccccagattgtaactatcacaatacaattggctcggcacttcacagcgccccttaataagtgtaagctgtatgctagttagagattgccgaaccagtggatgtgtgggcccgaaggattgcgacctcaacgagtacaaagtacagactgtaataggggggaatcgggactaacaaagcaatagcgtcgaaaaaaaaaatcaggaaacgcctgcatgtcaaccgacgtggaccctctacccgtaatgaaatctactttgtacacgcgaactcgcgtcgtgtgatgacatggcctgatgggattctccgtagatcgggaaaggatagatcggatgtggatatggcatgatcaatagtccggagtgaaatctcttcgaactgagcacattagggcgaaaatttttcacggcccaaaattgaggcccttgccctgcgagcttggattcttttaattctccgaatagatcacacggagaaaggctgtccttgttttctcgatccggatgtttcgaaaaacagccgcggtagacgatcgcttttgccgacttggttccccagttaggtctagaacaggactggttctcgaatggccccctggaaccgtttagtttaacggctttattccatgggtgtgggatttctggggaaatgtgacagcgacagcggcccaggggttgtcgaaaataaccggccagtcacaatattcctaatgaaaattgtgaaaattgtgaaacgggggcgtcaaagaaagtgctgatcgcggctcgtccacgggcatttgcaataacacgggggattccatttcgagacaatgagcccataaaagattatatacaagactccatcctccggagagtcatcgcttccagataacctcgggtggcgtcttctgcccactaattgccggtcgtcgtggcccgtgcagccgcggcatcatacagagccttgatatccgcctgccactgcttcacctggactctggccacgcgacggtcataggtaagcagtccgttgacctcgccctcgacatcggtcgtctgggtccagacccccccactgcatgcgtacaggcggatctgatcctcgagctcggtcaggagaaggtgactacggtaattccatgcctcaatggtggtgtcaatctcgtacgtctggtcaattgtatcgatggccgcttggttgttccacagatgctccatggacacattactcccgatgccgccgaattcgccctggaatccaatccgggtgggatcgtaggggctcgagggtgtggaataaaagggggtgccacattgtggatttgcgtaatggtgattgtcctacgagatgttagtgagccacgtggctggagcctgggccacaggggcacatacactaaagtctccagcgccgtggtcgtcccagcccgtcgtcgagtccacaagccgagtggggtccagctgtctaacccgctcggtcagctcaaactcggggtagtattctgtgatctggccccaggcttcgttgtagatgacctagatagtggttaacgtctggtctttcggtttcacatcatgacttacccaagttacgatactagggaagctcttcaattggttaaccaacaggtccaactggcgagtgaactcagcctgctgcttctcgtccggtaggatagtaactgagtttccatttgcgtccctcttggactgcgacgggcgcagggaaggcatgtcctggattacaagcagaccgagctcgtcgcaggcttgatagaacagatcggtctcgactttgatctacattccacggtgtgagcgcgagaaaccatgtgatatgcaacgcggcgacactcacatgcttgcgcaccatgttgaatcccaacttcttcaacatttccaaatcgtacaccatcgcctctttgctggggggcgtgtataaaccgtcgggccaatagccttggtccagagtaccgaacatgaaaatgaattttccattgagcaggggtcgctcaattccgtcaaccgtacccctggagactgtacggaagcctatatagctctccactagatcttcgccaagtttgacagtcacattgtacaggtttggggagtccggagaccagagtttgggcgaagatacgatgaattggaatggctcgttagtggggcctttgtgggttgcaacagtcttgccatcttgatggacagtgacttcggcctgggcggatttctccttagcagagctgtgtacagtgatatttactacacggtcagaatcaagcagcatttccacaaactcagagacttaccttgaccatccatgtttgcgtcaagatcgagttgggtgatgtgattggatggggcagcctccagccaaacagtttgccatatcccactgcacggggtataaaagatgtgactaggtctcagggtctgctttccaatggggatcacatagtccccatcgtcggtaggatcatgtacgaaaacaagtctgtattcaaagtcagatgtgcagactgtttaggaccctgagatactcacagctcattctgctgatcaaacttcaggtactttgtcacgtctaccgcgaagcggaagtatccgccacggtggaagcctgccttttcaccattgacaaagacagtggcttcgtagtctacggctccaaaattgagcagtacctgttcacccttccaagaaggagatacctcgaaggatgtcgaaaaccaagagtacaaagcccaatcgctttgaatgcctgcgaatttatcaattctcgatgctaacgcagtaagcaggagaggacctaccggacaatccactctcaagacacgatggaatcaaaacatcctgcgcaagtacctgcccaaaagggggctgctgaacagcatcgagaccttcggcattttggtacttccacaccccgttgagattcttccattcagaacgctgcagtaacggtcgcggatattcgggccatgggttcgttccgactttgtcggtccatggcgttgtcaagggaggctccttaagagagtaacccacactgcgcgccttgttttcctggtgctcggtactagggagagctagaccagttgccactagacacgacaagagaaaactctgagccaaatgcatgttgactggagaaactcagatcttggcagtatacacacacagtgacagttccaaaggtcttcggaagatatcacattttgggcatgatctggacttaaatacatcggaccctgcttacgcgggactagcagactcatggcacggtgagtccctgcatacaacatggccacttggcagagatgcacccacaagggccaaccctgcaggaagtacacaggatgcccggaaactcagattcactgaggaccggaagtatgtcggccgctggctgttgtccgaacacagggagcatcacccaccgcttggcgttactaacagcgcaggagccaaggacagcagccaagagccgacggtcgatgcgcgaatagtaattaaactacccatcacaaggaatgagctggatcttgcctgctacgggcacgctgggttctcgagataggtggaaattgccgacgtgcaataataactgtctctcggcagttccaggagcgacaaataacagcaggaagaggtattccgtattccacggagcatttcgcgccagtaaaaacacgagtcacgcgacagaacgttcggtctgagccgactgctctgcccaatactgcgagaatattaacgccgatcgcaacacacgggcgacagccgatctggctttaccccagacatgcatttcccgtgcaaggaaagtaatattgcttgctgtctcatctgttagcggagatatgcagcgcatctgcatatccaagtcaaatctaagaatgaagtcatgtttacatcgaatgatttgatcttgcattgctagttcagcaaggatcatgtttcctggccaatcccttgcgtccggattgcatggcacaccacgtccccaccctgagcgggatatatatttgacacaatggtctggccataatctgatctcgatatacttaccattcactcgctcctcacaatgaactagcattgccctaccccgcagactccgatgacgtggtagcttgaggttgtatcagctttcaatttaagaatccgaatggccgccctgtccctcagagtcaggcttggcgcgacgatcctctcttccctattggcgggttgttttgtccgttgctgtccgcttaagcccaagacgttggctagtttttggcttcgttcttccccacgttctacgagcggggcttatggtgagttgagtcgatgttccaatcatatattccgaacttggatgatgggaatcgtggtgtgatagaaaaatacataaccagcttttaagcaaatgaatactttgtccttgattttggagggttcttatctctaaccgatctatgtatgacctttcctgactggctaagaaattcacttctaacggctgacgctagcaagaaaacctcatcgtaggctagtgtcggttatgccagccttaattcggaatacgtacatgtggcagattacttgcatattgtatattgtactagaaagtaacgtaacgtcggcagtggatttcttttgcaaaaaagaaaatgatagatggcagtgttgctgtgcaacgggctcggttacagccggcaatattgtacagacggacaatccgattgcgaaagatggttagaaaagcccaaaatcccaaaaatcccaatgtgaactaatgtattgcggtagataggacatactactgtgtagtacgagggcttctagggaccatcacgacaaccggcctaatcgggttaccgcttagggctagttttttctgccggttgggctattctgccaaagttagccgattacatattcaccgcattaaaactaattattttggagtaggataaaaataatctggtcacgtgatatatacacacacgaggttatgatttacttgcttcgcttcgctccgcaatcatactatactccgaagtatgaaataatttgagtcaagggaattcttgctggtactagatgctcacatccctagcctgaattttcagtacggccttcctaatttggtaatccctatcggcacagtcctaatttggtcgagaaccgggtacctgcctggacacttggttctgcctaccgctctcttaccgcttccaaacttgtacacggcgaagtatggcagaaatatggcagaattcttagttgtacccgatcaggaaggcggtattggaatttcaggccgagcatccggtacgggcaacaattcccttcatttaaattgcttcagattcatagaccaggtggtccctaaatagcttcatctcttcgggcattatcaggcattaatattactcctactgatgataaactttggcacctaatcgtgtcgaaaacacataccgtgtgttggcgcctggcaagttggttaggcggtatttttttttctcctaattttctgcccggcaaaaaacccattgtcgtgatggtcccaaaaagtcctcgtaactgtggttgatttgcgctttgaggctggcgaaatggttaaactatagctgccgactgaagaagaatttacctcgtgccaagcttctcatcgtggctataaataaacttggtgggcatttccatgcctggacctaataacacgtaatatttgataacattcaaaagcaataatatgatatgaagatatttattctgcgttcctttcagcgtgttgtatcatatgtgtggtgtaacgggacatggtgagacaaagccaagatccgttaggaattgtagatgcttgacctgtgatcatatgcatctggcccattgagtagaagatagtcgagatatcgtgtaccaaagagccagaagataacggcgcagatcccaaagtatctagctaagggatttgcctgtatctaggagtttgcgagtggcgagcggcatttggtaagtactatctagtccaatcacattaggagttctccgaaatcccagggaacactcagaatcgaacgatacaatccccatcttctcgtcagcatagtgaccgctcatctccatcgggattgaattgatatcgggatttgggtggaacaatccgggaacgctttgtatgaccccgggattagggcagatcaccgaagttctacaatgatcaggtccacttatctatcatggcgtgatctgtatcaaatttagccctaacagaccccgggcttatcatatgtaggtatgtattggctttaatgcggattatcgaacttccgggattatcttctctcgtgacactgcattgaagcaaaccccgtgttgacttcccgagttgcactttactgccaaacatggcgacgattatagaattactccccgagtccgagagcttccgaatctcatgatgttactcctcttgtacttcggggtttggggatgtagactatcatttcaagccaacgtatgaggccgctggaagtgttataaattgaggatctccccaggcttaagataaggatttccattctacacaacagtcttcaaagcaaacactcgtcaaagtacaacaagcatctcaacatggttaccgttctcaagaagtacaaggccgcagcagtcaatgctgagcctggctggttcgaccttcaggaatccgtccgccggacaatccactggatcgatgaagcaggaaaggctggctgcaagctgattgctttccccgagctgtgttagtatcacagtcccaagtaccggatgcaatgtactgacaagatgaatagggattcccggttacccctactgggcttggaaggtgacctaccaggagagcctgcccttgctgaagaagtaccgcgagaacagtctcgcctccaactcggaggagatgcgccgcatccgcgaggccgccaaggccaacaagatttgggtgtctcttggatactcggagctcgatctcgccagcttgtacacgactcaggtcatgatcagcccagctggagatgtcatcaaccaccgtcgcaagatcagggccacccacgtcgagcgccttgttttcggagacggcactggcgacactaccgagtcggtgatggacaccgagctcggccgcattggacacctgaactgctgggagaacatgaaccccttcctcaaggcgtacgctgcctcgctcggtgagcaggtgcacatcgctgcttggcctctgtaccccggaaaggagaccctcaagtaccctgacccttacaccaacattgccgaagcaaacgcagatgtatatttcccccttctttatttttgcaacgacttgatctgattactgacaagactgctcagcttgttacccctgcttacgcagccgagaccggtacattcactcttgccccgtggcagacaattaccgccgagggaatcaaggtcaacacacctcctggaaaagagcttgaggaccccgagatctacaacggaaatggccgtatcttcggtcccgatggacagaacctcgttccccaccccgccaaagacttccaaggacttcttttcgttgacgtaagtggagaatatttttgttctatcagaacgtcaaactaattgatcaaacagattgacctcgacgagatccatctgagcaaggctttggccgatttcggcggccactacatgcgcccggacttgatccgtcttcttgtcgacaccaaccgcaaggacttggtcgtgcgcgaggacaaagccaatggtggtgtcatttacacccggactattgaccgcgtcggactttctcttcctttggattcgtcggctcctgagcctgagaccgagaactgagtctcaattcgagagtatgtagatctatttgccggactctagcagatatgtgtattgtatgacagaagacagaaataccaacttattcactcttttaccttttatccatagtttgagtgtaacttccttttgctctgtcacctaaaagaggttgagccgaactgcagtgacttggttcagacctcgagggcccagacccgtgaaacgcgtggacattccgttctctcaacattcttcacattctcatgcattttttcttatacctcaaggtaacaaattcagagtccaagacctccaaggtcaagttgcaaccatgtgcagaccaatactctacccgatttgtcgacgggccggcgagcagacaatggcccggagagtgtaacaatggaattgtctggggtacaatgtctcagatataatggagttgtcgccggaaacagaagtaccgaggacgacagtcgaccattttgacttgactataccgaccactccacattcccagcgtatttcatagtgtaatgggttttgaataattctaagatttctttggaggactttagagtgaacaaaaaccttaccacagcgatgtgcgcacttagtcccaaaaatacccttatcacccttatgaaacagcattcgatctgcagaacccaagaatgattaagttcactcttacactaacactacgtagagtaaataattttaagctcaagctcgacgtctagaagctgtcaagcaatgacattccgtaaaagttgtcggagctgccacgtgtcgatcatcacggaatgtgagattttgctgcaagcagaatttaattcttttaatagttgaacatgtaggctattatgtgtgtctatattagaagtatcaatgagaataaaagtggaagtcgcaagggaagcctggttttctaatttgatatagggcaatgaagtatagcttccccggatactattttgggtcgcagttgccaataaaacacatagtgacgaggtgacgaggtgacagacattttcacagcctttatccccacattatccaactatcattgttaccctcgtcaagagaacaagccctttgtctctgttttcggacactccaccttcctcttgattcagacctcgaagaatagtctatacaggtacgttacttttacttcaatctccatcattccccgtggggacttccgttctcgcccagtaacctttgtttccctgcatccggctacatcaagtcacttataactgctgttctccagccattcatctcaaatatattcattcctgaatcttcattcttcattcctcattcctcattactcaacaccagcctcctgacttcttaccaagttagggttatcagcatgccgtccatgtccaagttctcccaggcgtccgtgctcggactgtctttattggtagccttggctcaggctacgccaacagtgtgagtggtatctctctatcagagctaaagatctacaatactaaccgacattggtgtatagtagcctaaaattcaactaccgtggtgacaaggtccggggtgtcaacctcggtggctggctggtaacagagccctggatcactccatctctttttgacgcagctggtgatgctgctgtcgatgagtggtctctttgtgagactttgggtgcgaacgaatgtcgctctgttctgaccaagcactggagcactttcattaccgccgacgacttgaaccaaatcgccagtgcaggaatgaaccacgtcagaatccccgtgggatactgggccctgaagcgcttggatggtgatcattatgtcgatggtcagctagagtatctggaccaggccatcggctgggctcgcgccgccggtctcaaagtcattcttgacttgcatggaggtacgtgtcaggacctatatattacatagcaaccactgaccaacaatacagcccctggctctcaaaatggctttgacaacagtggaaagcgcggttctattcaatggcaacagggtaacactgttgacgataccaaagatgccttggaggctctcgccaaacgctacgaaggcgatggagacgtcgtgactgcgatcgaggctttgaacgagcctagcatcccaggtggagtgagccaagatggtctgagacagtactactacgattcatggggccttgtccgaaaggcaagccaggacaccacaattgtcctgcatgatggtttcgtgcccactgaatcatggaacggcttcatgagcgagtctaccggtgtctggtatgtgatgatggacacccaccactacgaagtgtttgacagcggtcttctcgccatggatacccaaacacacgttagcaacgtctgcagctttgccaaagaccatgttgtgacctctgataagtgggctgttgttggtgagtggaccggtgccatgaccgactgtgccaaatacctgaacggaaagggtgtcggtgcccgctacgatggtaccttctccggtagtcagtatatcggcagctgtgagggcaagtctactggatccgtggatgctctgtccgaggatgaccgaagcaacattcgtcgcttcatcgaaggtcaacttgatgcttacgagaagggtactggctggctctactggacctggaagaccgaaggtgctcccgagtgggacatgcaagcgcaaatcgctggcggtgtcttccccaaccctgttactagccgtgaattccccggccagtgctgagcgctagctggtatgtgccttgattctcctcctgtttttccaatgtcgcatggagcatgctactgattttgccgtgtttttgttttcttttgtccaacttttgtccagacctgattcgtattcttttaattgtctgctgggcttgcgtataagcgagttgattcctcgcggttttatggtgtgcttaatttttaaggctcgctggttaggttgtgaaactgataattcaacggataatcgtctactctcttaaggccttcttgctggaggatagccatcttccctactagtatttagtaaactcccaacctaggaaggtacacgtggagactaccggggcaaccttgactaactttatctcaaaatgacctcgataagtaccttacatggtacctcccctttcctggagaaggctgtgttttagtaggccttctttttccttctttttcttttttgggatctcttgcctagcgagaaataaaatgaatcacaacaattccaaggttcatttctcattcgcaatgtataagaattaaggtctcatgaaagatctatttttagcaagtacaataagctccgaaaggatatctgatggattgggatatgtggctgggattctgggaatgctaaaaatggaataggtggacctggtggtcatgcaaacataacaatatgagggtgtaaaaagcatatacaatgaaacggaggcaatgcaaagtcccaatgatatcaaaatgagcaaggggtcttcttcctacctcagagcagtccaagtgctccaaacgccgcaacaacgtcagtgtcaacgttgactagccattcgtcttggaaccgctgcgccccaccacagccagcaataacctcttgcagacgatggcgcacaaagtcccgaatcatgaagcggtggattgcatccccggactgccagtcacggcgacgaatgatctcaggcgattcgacctcttgtgtggtttctggcatcgccgttgcagacccggctggtgcattccagcataccaagtaatcggcatttgggtcggtacttccgtctgctaactcggtaataagatctgtccatacacttagatatgattgcaggaaagagaggatgtaggcagggggtggcgggggtaaagacgggtcgagtggcgctccttgtagggccaagagttgggtgagggcaagtacgtgaagtttcttttggttgatactgccaatgttatcgtagtgcaaaaaccattcggtcatgatccaggtcagagattgttcttcggatgagttggtcgcggcggcgaccgatgaggctagaatggtagggctggccagcgcaaggcgcgctagcacagagtagtaatcactctcgacgacaccgaccacaggtgaggattttctatttgggccagacgtctgactcgcttcgtgggcagagtaaaggccttctagcagggaggcaaggaatgagctctccagaagggattgggaaatgacacggtaggttgcttcgctaccgccgtcgacagtctcagcgccgcgaagcaataaatcaacaaggcgaggtatcacaccgagacgttgcttggttgtggatttgagtagtgattcaaggatcaccaggagttggaagcggaaacggtcactgaggatctcctgtggcgcgaggaacacataagattcaaggatatgaatggcctgcggagtgctatcggttgctgcttcgagaatggggaacaaagacggaaggagtgatatgatctccggcgaggcaggagatggcgtagcctgaattatggcatgccagagatccagtgcttcatctagaaggtaaacaatagtttccttgaatgattaggttaagctgggtagcatgattcacacgggacttaccgagccaggttctactgagctttggatcagtggaagaatgagagagtgatatctcacagactcctgtcctagcgattggatcaaagatgacagcaaagtcaagatagcttgtttcatcaaatgttcatcaccggagctttcccacaatggtgggagtaaagagatgattcgatcggagaagggagtgatctaatattgtgagttgcacagtcgccaacgaaaatgaggcaacaacttacatgatcttccatcttgaccaccaccatacggaccgtctccaaaagccccatcttagtatccgaggattcgacttcttgaacgagagacatgagactctccaagatggtaggcgcaaacgacataaatgcttcgggtgaaaactcatatgagtcaagtacactccggagttgtcgaccggcagtaatgcggacgaccaggtcgttcaaaggatcatgcttgccgagcaaatgctggaagatctggtaaattgcgttcatgttcaggtcgcctgccttaaccgggacccattggccgagaacgagcgcgattcttctcctcagaagcttgtactctggttcctgagactggacctcaacaaccatggtatgctccaagaatgcgttgaagtccaggtgatgttcgagactggccgcagccaagccgacggcagaatacagcgagtctttcaacagcacattgtggttatcggtgcctggagtataagtgttagagccacgcacacttaatacagctcatcaataacttactcgcgaaagtatagaatacggtcaacagacgtggaatcagtaaatccttgaagtgaatcacaagatcaaggaaaagtttttccgaacatgaacggattgagaactcccaagcgtcggcgttctcttcctctcgcttctcccagtcctccggttcttcttcccactcttggaaatcgatcttgcggaacctgaagaactgagtgactagtagctccatgacattgatcacaaattcttcggtgaagagttgcgttttgacgagttgaacagattgttttcgctcctccttgtcttccggtgtctggtatttgaacgtattcgcagggttgaatgccatttttgcgcatgcacggatcaagagcaaagcccggaggccggtcttctcaggtaaagatttcccttcattttcacccccagcaccaaggctgtcatacttctcgccgagtttgacgactaatgaccaatacgacttgacaagcgagatactatctggcagcaacgcgaaagatgcggggtgtgtctttgccatttcaacatgcaatttcgacatctgcagcaaatgtttctcgatagcgcgatggattggctcgggtagattggtagacccatccacaagagaatggaatttactaaagtgcgaatgggtgagctcccagaagccctgtacttcttggctgcgactcgggtgttcaaagccagcaatgatcaggcgtcttaagaccttgagagataccaaactcaattcgagcgtctccagcaactccccttcgctggcaccaccttggtctagtatcgtcccccattggttgactttatcaacatagatgccccccagtaactggaatatctcaggcgatacagactgaagattgtgtcgcgttcgttgaattcgtgccgtagataattccttgattatttgtagcaacatgaggagagttcggggaagttggagcgggtttgctccaggttcgacggatgatcggagcgaggaaataatgaacagaatggcatcgggcctggttggaattaggatgagcaaacatacagctgcatattggcttaccagtcatgaggaaactcaaagcgcatgattttggcaatcatcagcgagttatgaagagctagtagcggtgcgggctcaacgattcctgcctcaagagcccggctcttaatgcgttccttttcttccggtttaattgcactttcataaatgttagcacgacctcatcttggcgatattcccataacatacttcggtgctgtcttccgccagtatttgtcaatgccgttcttcagttggatgatggcgaggtagcgaatttcatttggtagggagtagtcaagaaaggcattctatatattatcaaaggtgttattgagtgaagcagcaacaaacaagactgtcgactaatacctgtagaaaagagtagtacatgccctgtttctcccagtattggagctgctcggtacccgtctgaacttgctgctgagacgagcttgccgcatgtactagcgcattgagcacattttggggggtgagtgggttggtctcaccctgtacttcgacggcgaaggccatggcgaataacggtgctgatcgcgtgaaagaagacttgtaaagcctaaaggcagttatactgaggcatgcaccaaatcagaggttcattgaggtaccctgaaccactggacgttcatgaaaatgaactctgcgagagttccgaatatgtcaattgatcaacggactgacatgtctcttcggagctccagcgtaaactccccgcctccgggaaatccatattccggtcccgctgaaccctagggctggaccctagcgtttgtcccgattcagaactcctgctagggctcccgaccgtttcccttcggtggagactatgaggtgtagcctcaaaccagtttggtcggattatcaagctaccggcaacttccaagattgttctcgagtaaaaatctctgattcaccactgttcctggattcttcccctcgtgacatacctatgatgtagcatgatgcaactacaattcctaacctgaagtgaagtagtcatgatgtggatgatctagagtgatatatatataaagcgcaattcagttcaatgttcatctcactatctaccaaattatctacacatacatcaccacatacaaaacctgaaaacatcatgcctaccaccgaagaattgaagcatgtatctctcaacgccgagaaggaccttaattcataccaggccaagcagggcagcggcaagaagagtgactcaagtatgtgaagaaattggtcttagtcggtctcatttatctaataacaattcaagctgccgagtcaggtgttgacgagatggtcgagcggcgattcccccagcccacgagtgtgaagtacggccctggctcagctgcctctggtagcgaccaccgtgtgattcccgaggatgagggcggcgttcgtgatgaccgcaacaggtaagccatacacccaccgcttctctatgcgctatgaatcgttctcattgttaacataacgttctttccagactcgctaaggctggtcagttcgagggccctggcggcccggaagacaaggtctaggtcaagaaccgtcgctgaattgcccagtaaaaatgcataatacaaatgatacctgatgacctgtactataatgaaatcctttcattcatttgatgtgttcaagccccgacttatacccgaccaggttaggcctagtaatgaacctcaccaatgttaccttcccggcagggacaatggataccaatatcgacatcgccagccccgctttgcgattttgttgagatttgtagaatcgtagagaatgttcattccgatcattttctggcccctttcaaacccaagtgctggcttcacttgtgccacccgaccactcaggtgagaaactgtaggcagtcccaaggtatatcctaagcacggagtaatatccatagatatcagtagccctatatccatagtccacggtgtgtacacaactccgaaggttcatgtgggtttcctctcccacgtgctcacctgttcttttgatcacgggaccgagcacgcccctaggccaagcccagtgatttgcctgggcaccactcactaaccatccaaatctgcttatctcaagaaccctgggaaatgcaccacatgggcacgctagcgccctatagttccccacctcgcttggatctgtctcactaacggaaattacgagaaatcagcagaagtagattacattcatggatacttgctgtctacgctatgtgccaaagtgcatacatgtatgcccagctacatttatgtacagttaatagactacccgtgggctcttcaaccacctaaagctgctatcaggggagaagcacggaaagaccccggaactccgggggcccgttgccatggaatagctaagttagctaagcattcgccttggcccctcttgactcgagccctcgaacttctgagcttttcggccaatcagagggctccctttctccatgtgcctgcatcatacaacgtctactctacccagacctcatctcaacatcaggtacggctcacaaagtacctctgtgagacttgaaagaaagctgaaaggcacacacaaccacgtgtacctgttcggtataccttccttcaaagtttatctccgacgtagatgcacgtgtatcggccctgaccccgtggaccttccatacatattctggcatttctaacattcttgacgatcttttcttctttcttctctaccatcctcattctcctcggtccgcctcggtctcatctcatcagctacatcaatcttattgattttctgcgagatctatcaaaatgaaggctgtcatcgcggttttgctgggagtggctactctgacagttgctcagacagctactacctctgagcctgctctcgccgacattcaggctgccgaaaccaccaagccggaggttaccgtctccgatgtcaagggcctggcttttgatcgtttctatcaagtctggctggagaacattgtacgcgacaatgatcaattcctggagtctcaaagacaccatggctaacagcttgataggactattccgatgccgcctcagatgccaacatgcagtggctcgcttctgagggtattctcttgtatgtttccaatgttttgagccatgagtgagatgacccattctaatattttttaggaccaacttctatgctgtcacccatccctccgagcccaactactgcgctgccgctggtggtgacacgtttggaatggacaatgacgacttcaatcagattcctgccaacgtttctaccattgctgatctgcttgacaccaagagcatctcgtgggctgaataccaggagcacattccctatgctggtttccagggctacaactattccaaccaggaaacttacagcaatgactacgttcggaagcacaacccgctggtgctttacgactctgttgtgaccaacaacactcgtgcacgtgctatcaagagctttgatgactttgaaaatgatctcagtgacaagaagcttcctcagtgggccttcatcactcctaacatgaccaacgatgcccatgacaccaacatcactttcgctgccaagtgggagcgttcttgggtgagcaaactgctcactgacgagtatttcatgaacaacaccctcctcctcctgaccttcgatgaggacaagacctacaccaacgacaaccgtatcttcagcattcttgttggtggcgccattcctcaagagctcaagggtaccacggacaataccttctacacccactattcgagcattgccagtgtctccgccaactggggtcttccttctctgggtcgctgggattgcggtgccaacatcttcgagattgtcaccaacaagaccggttacgtcaactacgaggtggacaagacttatctcacccttaaccagacctaccctggtcctatgtcaattggggacgacaccattggcaacacctccacctacactcccgtgtggcccattcccatcactgacagcaatgagaagtgttctgctggtcacggtatcctggatgccgtcaagcaaacctacggaaaactgaactcgacatacgacaccaagccgttcccctgggaagccaagactcactacaacgacaaggtcacattccagcgatcaaacgagaccacgaacgcgaccgccacgactaactcgacagcggcgagccctacccacactggcgctggatttgctgccacggctcctatctctactgtcatgctcggagccatgctggccatcgctgccttttccctctgattgagctgttccttatccattcttactagttgaccgggtgtgggtgtgggtctatgacccttgatcatctggtcccgattgactgggagggaatgttttctccaaatctaggagacgtaaaacacaatcagctatctccatctggaggctaatatcttaagctttagttatgaatccaaattcgttattatgatatttatgtcccattaaagactactagaaggaccataactcccactgcctagagactggcccctttatgtagctgatcgccttttcctgactatctaggtgtcggataccgttaaacactggatcttcttggtggagctaggtactttgcatgatcgtattgtactcaattttctatagccccgaaatgggatatccattctcaaccatgccttcggttcaaccagctatctttcacagacgtgctgtcttgatcaagatactcttagtctcaagaaaactgtcaagactatacagaagcccctcccggccactcccactcattttgaacccaccaaatgcagtatccttggcatttgtcgggcttgtgcaattaaccccaacaatacccgcatccagagccttcgccaaccgaacggcacgatcaagatctttagtaaagacagcagcgtgcaggccaaactccgaattattcgccttctcaatcgcaaacatggcaagtgggaagttccacgggataataagtgctaccacgccatatggctgcttgacggtcaggtttaggtagtccggggtgttgaggctggctgtcccctgcgcggtccaaccgccaccagcgaagtatgcaaatagctcggctgctagactggcgtcaaagaactgagagatcagtcggccagtggagagcgtttcgagcttcgccagctcgtcgtttgactccaagatgagctgagatagtttgcgcaagtatgcgccgcgcttgtcggtgcccaggtctcgccaggcggggaaagccgcattggcagcattaacggcgtcctctacatcttggatgtcggcttcttggactttggtaacagagtcggtgttagcagtatgttggcttttgcggagaaggggacacaccttgcgcaacaacctccttggtgtatggatataccacttcgaatgttttgccactagacgattttcgaaactagaaggttagtatgaagaagcatcattgtatatgaatagcagcctgcatagttacctcgccgttgatgaacagccgagtctcgatagattcgttcatcgtagatgccatagtggacagtgtgacagatttgacaataagtgaatcaagcataatcacgcatttagtcaggaaactaattcaacattgggcgatggttctgatttatatgcatgccagggagtccatcacctgcgccgacttcaagctttcaattggggctttcatttgaaacccaatcattagtcctcagtcccaaagccaaggacacctccgacattagttgtcatggatttcattgggcaatgtggttgaaatcgtacaaagtcatgtacaaatgacttgcatggatcaattgaaatggattatgttgactgctcagataccggtgtaacaatattagctgggcagtgaagtatcaagttatatgagcaactaaccgacctcggaccacttgagtccatgataagctcttgtcatggatgccttgatgagattcagtgactgggcagggtatctccgaggaccttctgagcccaccacaaagcttttcaatataacgttgtacctcggcagttacacgttagaatcatgcttgtatcactcagaatgtatacacttcttcactactcacaattggcaaaacagcattggaaatgcaaaagtcacgtggtatacctcggctcttccgtctggggaaccgagcgcggtcgatgagctacgccgggacccatttccccgtgctctcacgaatccccaaccagctccctcctatcatccacaaacacgtcatgatttcgcgatgagttcaacaaacttcgccgctgcacaagaacgagttcttcaacgtcgtcgccagcgtgaggcggaagcgcgcgcccgctatgcagcacagcagcgggcctctccgatcagcccggccaccgtccagcgtctgccatatccattgaatcgattacccggttcggggtggcggatatggaattccatcaagggccgggaaggcacgcgccccgcatttcgagtgggccaggtggacgctgaattgttggatgaggagttgcttgggctgctgaagggccaggtcggggatgctctcaaatacttcggggtatgtctgaatgaggctctggggtgttgtgagaaaaagtagctgacaccgacaatagcctcaaatgcgcgaagattggtcacatgagattctgttcgcgttacgggccatgctctttaaactatcaatatgggatcataacgcatcgtatggtgcggcactacaaggcctcaaatacaccgatagtcgaagcaaaggacccgttttctcttctccgacaaaatggcagaagggtatttatggcttattgacggttggagggcgatatgcttgggagaagtgggagagctggttggtcggacaagaaggtggctatgacgaggttagtgccgacacattgctctctattggcaatgctttactaacagatactacaaagccatcaccggacatccgaatgctgtcgcgactaacagacatgatctcgacatcgcactcgattgccgccttcgtctctttcctggtattcctagtgaatggccgataccgtaccttggtcgatcgcatccttcgaatccgccttactccaccgtctgcgcaggctagccgggaagtatcctttgagtatttaaaccgtcaactagtttggcatgcctttaccgaattccttcttttcctccttcctcttgttggaattggccgctggcggcgatggatatctcgggtctggaaaaagatggtcaattctgtccggtcaagcggcgatgacgacgagacccccgaaaaacaaggagagctggccttcctcccagagcgaacctgtgctatctgctactacgatcagaaccccaccacaacgaccgaaagcgataccatagccgcctctgcgtcagggggtattgtaggatcggcgcaaactgatatcacaaacccatatgagaccgtcccttgcggctgtatctattgtttcgtctgtattgtgcagaaactggaagcggaagaaggccagggatggtcttgcctccggtgtggtgaaattgtcaagaagtgccaaccttggaatggcgatgtgctagaagaggcacggtcgcagcctggaactgggaagattgttggctttgccattgacggtgaactgaatggcgagatccgtgggacagatcttcatcaagggggctcatcaaataagtctagcccattgcaagagatcagtgccgatgaagccctgcagcattcagagcaatggtccaccattgagaaagaggcagaagatgatggcagaagaggtacgaacgaggatgagggcccaaaccctgctgcggtgtgacagtactcttaaggcacacgcctcacaccccgggtgctcttgggggtatgtaatggccttctcttctccgacttgtttataaatatacaattacctgggtagtcgcagcgcatatgcccttataaaatttaacgatacccatactcgaagaccgaagtttcctttcacataatcatacaagggattcatttaacaaatagcggagaatttcaatacggcacagcttcacaacttctggcattcccctttaaggaatcatccagctagagacagcagtatagaacccaatgccagctccaatgagtggaaacacagctctgatcaaattcaactgcgaccaatgctgcagaagttcaaccacctcgccatcctccctagcccgcttcgccttctcttgtggactaactaccatgccctcggtaccctcagcgtcagccgcatcatcgcgctttgcatgagccttcagcttggtatttgtctttctcataactgtaagagtaaaaggcgtaatgctcatcgtaaacccgatagcaagcatatagcacgtggaccagctggacccaaagatatccggcgcaggggtagcggagtcccgcaatgcccagagcgcatacaggtttgcaagtgaagataccgcggatataccggggaaaatcttgcttccacgagtatatatatcgagccactggtgtgtcaaatggccgggcgaggttcctggggtatcatggaatggcagggtcgcgctgggtgggcgacgggctggaattatgagattggggatgcttattatggataatgaagcaatgccgccttgtacactatgagtgtctggtcatctgttgcgtaggcagtgctacttacctgctcccactgcagagccaagtgtccctattgcctgggcgattctcacgtcggtggccattatacggctaatgttgtgctcaggaagtattgcaataagagagttcggtcaaaggagcagaatgctgcttttatgctgatagcatatgtatgacgtctacgaagggggaagtgacatgcctgattctcatggtatacctcaattaggcctcccttctatattatcttcaaccgcctttactattgacgctagatcatgaacagagagaatagatatctagtattgggtgaagatagaacatggggttagcttcattttgcctgcctatctaaatcagacatctaccctgaaaatcaggcatccaacttttggcccttcgcgttggtgccatggatgatgtggcgagttgcgacgatccctccattgtaaataaactagatatttcaacctgaaccattgatatacaaactcataatgccatatgtatacaacctcattagatccggagactaggcccaactccgatctgctcataaatcggccgcatctgactggacaacgaacgtggggtcctgggtgtcggacatcggtgcgaaaatcgagctcccgaggttgtctgggctataattctggtcaattgcatctccaatctctttctggtttcgttatcatatagctatcatatatcatcatggatccctcaaagtcaaccgtgcctagcactctcagtgaggctaaatacatcaactttccttctttgcccacagatgcgaagcatccggatggctcccccgcactcaatcgttactcccacactattaccaaaggccatgatttccccggcgcacgggtaggttggctataagaacactgcaggatctattactgaccgctataggctatgctctatgccgccggtgtcccagataaagaagcgatggcgaagagcccacatgtcggtatcgcctcagtatggtgggaaggaaacccatgcaacatgcatttgatggatttggccaagaccgtcaagaagtcagttctggaacaaggaatgcttgggtggcagtacaacacgattggtgtttcggatgcaattaccatgggcagtgaaggttggtttgatcctcaactctcatctctagcaaacgagatagctaacaccccgctaggaatgagattctctcttcagactcgagaaatcattgccgatagtgttgagactgtaacctgtgcccaatatcacgatgcctgcattgctatcccgggctgcgacaagaacatgcccggtgtcgtaatgggtatggcgcgccataaccggccctcaattatgatctacggtggaactattggaatcggctattctgagcacctgcggaaacccatcaatgtctcaacgtgcttcgaggctgctggtgcctacgcctatggtaccctgcgccaacccgacgatggtggtgaccaaaccaagtctcaggatgagatcatggatgacttagaacggcatgcttgccctggcgctggcgcctgcggtggtatgttcacggccaacactatggccactgctattgagtcaatgggtctgtcactacccggctcatcgtccacgcctgctgaatcgccatccaagatgcgcgagtgtgttcgtgccgcggatgctatcaaggtttgcttggagaagaatattcgaccacgggacctactaaccaagcggtcctttgaaaatgctctcgtaatgactatggcgctgggcggcagcactaacggtgttcttcacttcctggccatggctcggacagctggtgttaacttgaccctggatgacatccagcgggtcagcaacaagatcccctttattgccaacctctcacccagtggaaagtattatatggccgacttgtatgagatcggaggtgtcccatctgtccagaagctgttgatcgcggccggtctacttgatggagatatccccacagtgacgggcaagacgttggccgagaacgttgcctcattcccttctctgaccgagggccaggatctgattcgcccattggacaacccaatcaaggcgagcggtcacctgcagatcttacgtggtaaccttgcaccaggcggtgccgtcgccaagattaccggcaaggaagggctccggttcgttggcaaagcccgtgttttcgataaggagcaccggctcaacgacgccctgaatgagggccgcatcccgcgcggtgaaaaccttgtcttaatcgtgcgttatgagggccccaagggtgggcccggaatgccggaacaattgaaggccagtgccgcgctgatgggagcaaagttgaccaacgtggcgcttattactgacggccggtattcgggtgccagccacggtttcattgtcggccacattgtgcccgaagccgccgttgggggcccaattgcactcatccgcgatggagatgtcgtcaccatcgacgctgagaccaactcgctttcaatggatgtctcggatgaggagcttcaggagagacggcgtcagtggacccctccttcaccgcaaatcactcgcggtgtgttggccaagtatgcacgattggtcagtgatgcatcacagggagccatgacggatctgttctaatgaatcattatgatatgtcacctgagtgtaaatatagcatatttctaggctgttgaaatgatgttatgatctacgtgttctagaaaatttagaaaagggataaacacgacatgatcttcgtggcccgcttgaaattggccagtggtatgtaagaagccacgcatgctggctcgggaggtactataaaatggagtccaacacggagtagggagtagttaccaacatcttgggaaccaaagtgtacataatacattgtagggggcaatacgagagagcaagtggttatacatagaaaaagaagactaaattatactaagatctaacactaatgtacaaatcatctcgaatgttcaatttttcaaaaggtacttcttctcccatagtaattgccataatcaagcaagttccttccaaaacttgtggctgcaatacacaggttggaggggccaatggatgacgatgactcacccccacgccgctcctcccgaggctgtgagtggctgaagctgaaccctccgtgcattttcttatcctcgcaactcatttcaacgttgtcgacctagctatcctcattggtctctagcctacttgctctatatccaaagagcatcaggagcgccatcgcgtggttcttggcgagatcactatcggggggctctgaaagcgcccagcacgcccctccggtacttaatcatgggatccgacgctatctccgccctatatgactcgttaacgtctcaatctgaacctcgaagtgtcgcgactgttctgcgattctttcactcagtgcgcgctaccgcccaaaacgcttcattcgcctctatcgccaactatttccgcggcctctaccgcaatgaaaatgtgaattggggtcgggttgtgttcttgactacctgtgtgatcgctatgactggatgtgggttgttgtcgctggtgagacgcaagcggtcggggaagaaaagctctcgtgcgcaacgtcccgccgctcgcaagacgtcgaccaaatcctcgaagactctgagctcctcggaggaggaggattatgaagatgaagactacgacagtaatgcatcgctgcgacatggaaccaaccccaactataagacggaagattggtcgtctgacagtcagcagcaaagctctgatggtaggtgaatagctcatcttcaccgggggccttcattaacacttgcgcagcctacgaaacggacccgggcattctcaggaaattcaccacatataactcctacactacctcattcgccacttatcccgccattcgcaccttttacagcccgcatccacacctagctcgactcccgaccaaaccgactcctgttccactgatcgtggttgttcatgggctaggcgggtccctcgcacaattccaccacctcctaaccagtctgtctaatgttgcttcatgctttggtattgatttacccgggtgtggattgtccaagtttgcgcctacggattgggatgcatacaccgtggaggctctggctgaactgttagctgaagccattgatcagcacagggaccgtgcgtctggccaggaagtcattctagtgggacacagtcttgggtgttccttgtcagccctcttggcttcatcaacgtcgcccattggcgcaaaagtgaaagagcgtatcattgcccttgttgctatgtgccctcgagccgagcctccatctgcggaagacactgccaaatttcgccgactactttatgttcctggtccaattttcgatctttggcgccgctgggacagacgtggaggcgaacaaagtgcaagtgttatgcggatggtcggcatcgctgccgacgcggaaacacgaaatctccaggtgcgcttcaacaagcaaagtcggacgcctgtttggcgacgcatggcgtggggtacacttcccacctacgataatggtggccacccgattggcgggctccctggtcaacaggtctgggcggggattcgcatgccagttctattggtcgcgggagagacggatgctgtgaccaaaccggtggaggtgcagaagcttttgaaattctttggcgatgcttcagcccatattgcaattgacactagcgatagcagcatcatcccagacgcttcgcgagtccacgaccagatgtcacctccagtcggcgatctcgtcagtgggaaggcgtttggtgtgcaggtctccgaaaagcatttggacggtgcccagcggaagcgagtggtcaaatcagcgattttgccggcgcccgcatctcacgcactgctctacgaccgggcgacctatcgcactcttgcaggaattatccaggatttcctctcgtcaaatgtcgacaagcgtctcggtctgggctggcaattgcaacacatgaacacctctggaaagtgggatgtcaagaacctcgccaaatggaagaaggttgtcccagtctcggaacgaatcgccaacacatttgtcgcgctcaagatgttgcgcgaggttgacgaggaacacaatcctgtgactttcgcggcaaagtatcatggtcgcatacacgctgtcatagacatcagtcatgaaagtccagtctataacccagccgaactggaggcgggtgggattcgctattacaagcacccgactatatccaagattcctccgactccagacgagacgcgtgactttattgctctggtcaataacattgaaaaggatattgatgcgaagatggagcagcgtacggaggaagagaaggctctgccacgcccagtggtcggagttcactgccactatggctataaccgtacggggttcatgatcgcctgctatctgatcgagcatcttggttttggtgtacaagatgccattgacgagttcaaccggtgccgaccccctggtatccgacatggtcattttattgacactctatttgtgagatattgcgttggactgaagagagcgcccacgctgtaattgggaatgattcaggcattgaactgagacgaatactatggatcaaggcaacaggaatggttgttggaagttacgaataatgacaactgcgatgaaatagatttttagttggtgtataattagaacatgagaaattgagctcttcaaataatctttcatcacgaattgtatgtgtcttgtagttatgttgtatgtcatgtgaataattaatgtccggaaaatcaggcacgaaggtgtctgatttagagcccgatccgtcaggcacaaattgggctacatcacatgacccagcttagggtacggctaacccaaaatggacaagcgaacggcacacagacccaacccgcccagagttgtgtgtgtcttgaaattttgagcgactcttcgacttcgaccctgcccacctcgacgcccaacgcctctctctctctaatccctacccttcgacccctcgacaagtcgccaaaatgggtggtgttaccgttcgcgatgtggacgtaagtgtcctgctcgatttttaggtcaccagctctggtttgcatgatgtggacggttcgtttctggatgcacggatatcacaacatcggtcgggttatatcgccaggatggaaatagttcgggttgcgcacgcaataggcatatggtttcattgcttatagggaatatgtcgaaaattgagggatgtgcatgcatgttatgagcggcgaatatttgatagatccgtctatctgtcggtattcctcagggatacttgacacaacgactgcttactagcgaaaagctccccacgacgaatgatgaaatgcttccagaaacgaatccgacgcatctgcaaatccacagaacttgaccgatccacgcatatcttgagccacaactaacataacttttctcctccacacaggcgcagaagttcatctctgcctactctgctttcctgaagcgtcagggaaagctccccatccccggatgggttgacactgtcaagacctctgcttccaacgagctccctccccaggatgctgactggtacgactgcaccaaatatcaagccaacaaaattcgaacaaacaattgacattcttgctttcttaaaggttctacatccgcgctgccgcctgtgcccgtcacgtctacatgcgcaagaccgtcggtgtcggccgtcttcgcaaggcccacggttccaccaagaaccgtggctcccgccccgcccaccacgtcgatgcctccggctccgtcgaccgcaaggccctccaggctcttgagaagatcggtgtcctcgagatcgatgaggacaaaggtggccgccgcatcacccagagtggccagcgtgatttggaccgtatcgccaagaccaccgtcgatgaggaggaggagtcggatgaggaataaacgtatcgcaacgatgggcttttaatagttcggggataagtcgtttgtttttgtggttttgtcttcgctacggcggcaagatattggaaatgacggcacaaaaataaaaattcggagcttgcggtcccgtgcgcgactttacgtttgtttcttttttcttgttccactccatatttttttttctgacgaccagacggggctactagcggagagagatatgggcggtgcagagtgcatgaggatgaggcatcatatccggagacttgaacgagagaagagagcggacgagacgttctacacaatccttcccctctctctcttgttgagaggaggggatcttttttccccgacatgttttatgatctccctctcctctttgaccccgatcaaccctacggcgtctttgtcccttttttctctcgtggtctcctggaaataaagagcatgtctaaacactttaaaactgttccgtcctctctctctgttgtagatgtagatgtagacgtcttgtatcatttagccagcagatcttcagcattccatatctatggatcggttctcaaaagcccaatttatatccaaccattgctattggttttatgcaactctcgttcttacatatgtacaagacaagtcttaagttagctcgcattccaatctacttcatttctttcccgactgtgccgcggtatcctgaagacaatcaatcagcaccacatacaccaccttacagctagcacaaggatgtactcaccaaataaacctgataaaactgcatcttgatatcttcatcccccttctggggcgcgaacacaacccgtccagcccaaggcacataaacctcattatcagggttagccttgagtctatagttcacgccaccatacaacatgagctcattgtcaccaccgaagtagatctgcgtcggcgtgtgtcggcgtgaagcaacgtgtgtccaaagaccgtggcggagggtgagaattgctacaggattggtcttgttagccgggatacaacattgggcagatgtatattttgcatcgaagtggaaaccgggatcagaagctgtatagcttccccgatgttgagggcggggattggataacaccataccgcttgcacccttggcctccttgggtcccatgatgagtgtcgcatcttcggtgaagctctggacatatttctcgtgcagggactcggtgtcgctagtgcggtagaagtcttccatgaatgcgacgaacgcggcgccgcggggtggtgcccgggcagtgtcgtaggcgatttggtaagacattatggatttgtcagttagggagaaatatttgcaagttgagaagaataatgagagatcccgcagaatatgtctattctatcatgaggggaaagtatcggaagggacgcatcctgtggcaagtaagcttggtggggaagatgatgatattatgaaccccttgttgggggtgctaactagctaactatgactaagctgtgacaatatgccgggtctcaaaaaatctcggcctccggctgagaaaaaaaggaaatttcaataaaaaataagaataaaaaatgataagaaaacgaaaaacgccgtcagttgtcgcaggcccggggcggagtatagatgtccgagggcgtgaattcacgcccggggtcgtacggtggcccctcggtggccacttcgagaggagcttcgcagtggttgccacgttctttatcgcctagtagtaacgggctctctagttgggcttggttgttaggagcagcgctttattaaagttggcaggggcggtggaacaggttttcccagcgtctgatggctcggcgctgaatatccgggaaactgctgagcgtgttcgagattgtcataagggtgccagcggcaacggcttcggtcttctcggtcagagcggcctcttggagttacagctggcgatatctagccatgtgttcgcgtaacctttttaaatcctcgatctctggctgtacccggtccatatgctccattatgcctttatagggaaggatgaaatcgcggaggatcttttcctcggtatcagctcggcacagttggctttgcacggctggcaattggctctgaggttcaggaatgtccggtgaagagaacggagcggaagagctgacgctgatcgcgtcgccaggttggtcctgcgtggtgggctggcattcttgctgagtaccgtgactagaccaagttggacgatttgtattctggtatgagcgttgaactgggtccatgatcttcatctttttcaggtccattcgggagaaagtaaaagacagcacttcagccgagcatgaaggagaccacgtggagaattcccagaaaaaaccataggagggtcttagtccttgtaggagcatagcgacgtggtggtgattgtctgagccgatgtccagcatctttgagttcgtttcagctttccagagcgtggtatactgaccgtggtggttatgcaattggcgtaccacagaacgggggtacggaaattcggcttgttcttcagcgtggcgggcttggaataccgctgctgggtcagtaactgcatcctctgcgaaaggataacctaggacgataggtccgattgtgaaaaccgggttttcgattttaagctttgaatctgccttcgggaccatcaggtagccgtattttgcggctgcacgaaggccaacgaacgcatagtaacgtttccagattggcgcgcatgggagaccatggaagtcgattcgtgggccggggtcctgtggtatcctgctagcacgtggttcaccgttggcgtcccagacggcacggaactcggcgcgcttcttctgagacagttccttcatcgctgcgtaaacaagctcgtcgcttagcagaacgttgcggtcgtcaggtagcaccagccttccttttgggtcgcgctcgtatctcacgtataagggcaaccgagcgatgtcttgtggagatagtctactgcctgtgataactgggacccagtcactggtccagattggcctatccagttccagttcagtgcgagcggcatcacgagattgtgtcatgcaggaatcgtcgaacgcgcatcccggaaggcaaagcatatcagtcgctccctgcgacggaccaaggcacgggagtgcctttcttttcggcataatgagtctggtgtgtaagaaagagaatggttaatgtgaaaaaagaagcaatggaggtaggaaaaatggaacaggtacgtcgagcagcaagtaacagtcgaatgagagtcagaaactcaaatcggagtaaaagtaggagtcggaagtaagagtcaagtgacgtgaggtagtgagaatggatagtaataaaagtaaaaggaaagtaaaaataaagcgaggaaaacgtggtacttaggagctcgccgggggtacgccctgacgctcctcgaagtctttgatagcctcgtcacatccgatgcagtcctcttcccgcacccaacagtcgtccctagctgattggcctttccagcggatcagatacttagtgatttgacgcctagtaccgtcgtgacggggtcgaccaggcgcgttgacgacgcgcttggcaagaatgcggtcgacctcgtagacgatatcttcggggaaacgctcgtctgtagtcgggtggtgttcgtcatctggttggcgctcccaggggtcgtcaccgtccggggcgggttctaggtgtgcgacactgatgactgggtggattcttgactcagttggaatattcaaacgataagcaagcttcccgacgcgttcgagtacttcgaaacgcccgacgtaacgctgtcgtagtcgccttggtaaaacttggttcaacggtgtgtcgtatccgtgtcccagcttaagatagactttgtcaccgacattgaaaaaaatctgcctgtgatagcggtcgtattggcgtttcatacgcatggcagcccaagcggcagaatgctcggcatctgcacgcgcggcgatgtcgggagctgtggcttggcgtaaaagcgaccaagggtggcgtagttcgacaccgtataagagtttgtgaggtgagtgacctgtcgttacgctgactgagctgtttagcgcagcttggagggcgggtaataggtttggccaatcttcgtcggggtgagtggcgattgcgtgccgtacagcaacttcggctgtctggttagtacgttccgactgaccgtcagtttgtgggtgataggcggtagtaaaaaacaacttggtgtagatgaggtcgaaaagtgctttccagaggccctgcgtgaacttggggtcgcgatcgctgataatcactgtaggaatcccccaattggctgtccaccagaaagagagagcacccagcgcccaatcttcaccgtcccagtctgcgcagccaggtatcattcccatcaacttggtgaacttgtcggtcatagtcatggccgcgtcatatccgtcggtcgaaatgggcatcgcgacgattagatctaaagtgatagtgtgaaagggtatcggcagggcgatgatcggttggagagaaccgtacgggcgatgacggcggatcctgtgctccaaacagatagggcaatgttcaatgtactgctttaggagcttggcgcctttgtagaatgtgataccgcgaagcttatgccaagctctgtcgaaaccctggtgcatctgctcgtcatgaaccaagttgaaaatttcctgagtcatggatcggggcagacacagactctcctcgccgttagaatttgtgaaaatgatcaagccattctccaggtggtagggtaacttctcaacttggggatcctgctgggcgtcaacgctttctagagtgtcgatcagggctgaccagcgagtgtctgactggtatcctcgcaagatgcgatccttagtgtcgtcgcttagctggagcaccgatgctgtaaggaggtacgctgtgggttggtctgctgtaggttgtttaaatannnnnnnnnnnnnnnnnnnnnnnnnnnnnnnnnnnnnnnnnnnnnnnnnnnnnnnnnnnnnnnnnnnnnnnnnnnnnnnnnnnnnnnnnnnnnnnnnnnnnnnnnnnnnnnnnnnnnnnnnnnnnnnnnnnnnnnnnnnnnnnnnnnnnnnnnnnnnnnnnnnnnnnnnnnnnnnnnnnnnnnnnnnnnnnnnnnnnnnnnnnnnnnnnnnnnnnnnnnnnnnnnnnnnnnnnnnnnnnnnnnnnnnnnnnnnnnnnnnnnnnnnnnnnnnnnnnnnnnnnnnnnnnnnnnnnnnnnnnnnnnnnnnnnnnnnnnnnnnnnnnnnnnnnnnnnnnnnnnnnnnnnnnnnnnnnnnnnnnnnnnnnnnnnnnnnnnnnnnnnnnnnnnnnnnnnnnnnnnnnnnnnnnnnnnnnnnnnnnnnnnnnnnnnnnnnnnnnnnnnnnnnnnnnnnnnnnnnnnnnnnnnnnnnnnnnnnnnnnnnnnnnnnnnnnnnnnnnnnnnnnnnnnnnnnnnnnnnnnnnnnnnnnnnnnnnnnnnnnnnnnnnnnnnnnnnnnnnnnnnnnnnnnnnnnnnnnnnnnnnnnnnnnnnnnnnnnnnnnnnnnnnnnnnnnnnnnnnnnnnnnnnnnnnnnnnnnnnnnnnnnnnnnnnnnnnnnnnnnnnnnnnnnnnnnnnnnnnnnnnnnnnnnnnnnnnnnnnnnnnnnnnnnnnnnnnnnnnnnnnnnnnnnnnnnnnnnnnnnnnnnnnnnnnnnnnnnnnnnnnnnnnnnnnnnnnnnnnnnnnnnnnnnnnnnnnnnnnnnnnnnnnnnnnnnnnnnnnnnnnnnnnnnnnnnnnnnnnnnnnnnnnnnnnnnnnnnnnnnnnnnnnnnnnnnnnnnnnnnnnnnnnnnnnnnnnnnnnnnnnnnnnnnnnnnnnnnnnnnnnnnnnnnnnnnnnnnnnnnnnnnnnnnnnnnnnnnnnnnnnnnnnnnnnnnnnnnnnnnnnnnnnnnnnnnnnnnnnnnnnnnnnnnnnnnnnnnnnnnnnnnnnnnnnnnnnnnnnnnnnnnnnnnnnnnnnnnnnnnnnnnnnnnnnnnnnnnnnnnnnnnnnnnnnnnnnnnnnnnnnnnnnnnnnnnnnnnnnnnnnnnnnnnnnnnnnnnnnnnnnnnnnnnnnnnnnnnnnnnnnnnnnnnnnnnnnnnnnnnnnnnnnnnnnnnnnnnnnnnnnnnnnnnnnnnnnnnnnnnnnnnnnnnnnnnnnnnnnnnnnnnnnnnnnnnnnnnnnnnnnnnnnnnnnnnnnnnnnnnnnnnnnnnnnnnnnnnnnnnnnnnnnnnnnnnnnnnnnnnnnnnnnnnnnnnnnnnnnnnnnnnnnnnnnnnnnnnnnnnnnnnnnnnnnnnnnnnnnnnnnnnnnnnnnnnnnnnnnnnnnnnnnnnnnnnnnnnnnnnnnnnnnnnnnnnnnnnnnnnnnnnnnnnnnnnnnnnnnnnnnnnnnnnnnnnnnnnnnnnnnnnnnnnnnnnnnnnnnnnnnnnnnnnnnnnnnnnnnnnnnnnnnnnnnnnnnnnnnnnnnnnnnnnnnnnnnnnnnnnnnnnnnnnnnnnnnnnnnnnnnnnnnnnnnnnnnnnnnnnnnnnnnnnnnnnnnnnnnnnnnnnnnnnnnnnnnnnnnnnnnnnnnnnnnnnnnnnnnnnnnnnnnnnnnnnnnnnnnnnnnnnnnnnnnnnnnnnnnnnnnnnnnnnnnnnnnnnnnnnnnnnnnnnnnnnnnnnnnnnnnnnnnnnnnnnnnnnnnnnnnnnnnnnnnnnnnnnnnnnnnnnnnnnnnnnnnnnnnnnnnnnnnnnnnnnnnnnnnnnnnnnnnnnnnnnnnnnnnnnnnnnnnnnnnnnnnnnnnnnnnnnnnnnnnnnnnnnnnnnnnnnnnnnnnnnnnnnnnnnnnnnnnnnnnnnnnnnnnnnnnnnnnnnnnnnnnnnnnnnnnnnnnnnnnnnnnnnnnnnnnnnnnnnnnnnnnnnnnnnnnnnnnnnnnnnnnnnnnnnnnnnnnnnnnnnnnnnnnnnnnnnnnnnnnnnnnnnnnnnnnnnnnnnnnnnnnnnnnnnnnnnnnnnnnnnnnnnnnnnnnnnnnnnnnnnnnnnnnnnnnnnnnnnnnnnnnnnnnnnnnnnnnnnnnnnnnnnnnnnnnnnnnnnnnnnnnnnnnnnnnnnnnnnnnnnnnnnnnnnnnnnnnnnnnnnnnnnnnnnnnnnnnnnnnnnnnnnnnnnnnnnnnnnnnnnnnnnnnnnnnnnnnnnnnnnnnnnnnnnnnnnnnnnnnnnnnnnnnnnnnnnnnnnnnnnnnnnnnnnnnnnnnnnnnnnnnnnnnnnnnnnnnnnnnnnnnnnnnnnnnnnnnnnnnnnnnnnnnnnnnnnnnnnnnnnnnnnnnnnnnnnnnnnnnnnnnnnnnnnnnnnnnnnnnnnnnnnnnnnnnnnnnnnnnnnnnnnnnnnnnnnnnnnnnnnnnnnnnnnnnnnnnnnnnnnnnnnnnnnnnnnnnnnnnnnnnnnnnnnnnnnnnnnnnnnnnnnnnnnnnnnnnnnnnnnnnnnnnnnnnnnnnnnnnnnnnnnnnnnnnnnnnnnnnnnnnnnnnnnnnnnnnnnnnnnnnnnnnnnnnnnnnnnnnnnnnnnnnnnnnnnnnnnnnnnnnnnnnnnnnnnnnnnnnnnnnnnnnnnnnnnnnnnnnnnnnnnnnnnnnnnnnnnnnnnnnnnnnnnnnnnnnnnnnnnnnnnnnnnnnnnnnnnnnnnnnnnnnnnnnnnnnnnnnnnnnnnnnnnnnnnnnnnnnnnnnnnnnnnnnnnnnnnnnnnnnnnnnnnnnnnnnnnnnnnnnnnnnnnnnnnnnnnnnnnnnnnnnnnnnnnnnnnnnnnnnnnnnnnnnnnnnnnnnnnnnnnnnnnnnnnnnnnnnnnnnnnnnnnnnnnnnnnnnnnnnnnnnnnnnnnnnnnnnnnnnnnnnnnnnnnnnnnnnnnnnnnnnnnnnnnnnnnnnnnnnnnnnnnnnnnnnnnnnnnnnnnnnnnnnnnnnnnnnnnnnnnnnnnnnnnnnnnnnnnnnnnnnnnnnnnnnnnnnnnnnnnnnnnnnnnnnnnnnnnnnnnnnnnnnnnnnnnnnnnnnnnnnnnnnnnnnnnnnnnnnnnnnnnnnnnnnnnnnnnnnnnnnnnnnnnnnnnnnnnnnnnnnnnnnnnnnnnnnnnnnnnnnnnnnnnnnnnnnnnnnnnnnnnnnnnnnnnnnnnnnnnnnnnnnnnnnnnnnnnnnnnnnnnnnnnnnnnnnnnnnnnnnnnnnnnnnnnnnnnnnnnnnnnnnnnnnnnnnnnnnnnnnnnnnnnnnnnnnnnnnnnnnnnnnnnnnnnnnnnnnnnnnnnnnnnnnnnnnnnnnnnnnnnnnnnnnnnnnnnnnnnnnnnnnnnnnnnnnnnnnnnnnnnnnnnnnnnnnnnnnnnnnnnnnnnnnnnnnnnnnnnnnnnnnnnnnnnnnnnnnnnnnnnnnnnnnnnnnnnnnnnnnnnnnnnnnnnnnnnnnnnnnnnnnnnnnnnnnnnnnnnnnnnnnnnnnnnnnnnnnnnnnnnnnnnnnnnnnnnnnnnnnnnnnnnnnnnnnnnnnnnnnnnnnnnnnnnnnnnnnnnnnnnnnnnnnnnnnnnnnnnnnnnnnnnnnnnnnnnnnnnnnnnnnnnnnnnnnnnnnnnnnnnnnnnnnnnnnnnnnnnnnnnnnnnnnnnnnnnnnnnnnnnnnnnnnnnnnnnnnnnnnnnnnnnnnnnnnnnnnnnnnnnnnnnnnnnnnnnnnnnnnnnnnnnnnnnnnnnnnnnnnnnnnnnnnnnnnnnnnnnnnnnnnnnnnnnnnnnnnnnnnnnnnnnnnnnnnnnnnnnnnnnnnnnnnnnnnnnnnnnnnnnnnnnnnnnnnnnnnnnnnnnnnnnnnnnnnnnnnnnnnnnnnnnnnnnnnnnnnnnnnnnnnnnnnnnnnnnnnnnnnnnnnnnnnnnnnnnnnnnnnnnnnnnnnnnnnnnnnnnnnnnnnnnnnnnnnnnnnnnnnnnnnnnnnnnnnnnnnnnnnnnnnnnnnnnnnnnnnnnnnnnnnnnnnnnnnnnnnnnnnnnnnnnnnnnnnnnnnnnnnnnnnnnnnnnnnnnnnnnnnnnnnnnnnnnnnnnnnnnnnnnnnnnnnnnnnnnnnnnnnnnnnnnnnnnnnnnnnnnnnnnnnnnnnnnnnnnnnnnnnnnnnnnnnnnnnnnnnnnnnnnnnnnnnnnnnnnnnnnnnnnnnnnnnnnnnnnnnnnnnnnnnnnnnnnnnnnnnnnnnnnnnnnnnnnnnnnnnnnnnnnnnnnnnnnnnnnnnnnnnnnnnnnnnnnnnnnnnnnnnnnnnnnnnnnnnnnnnnnnnnnnnnnnnnnnnnnnnnnnnnnnnnnnnnnnnnnnnnnnnnnnnnnnnnnnnnnnnnnnnnnnnnnnnnnnnnnnnnnnnnnnnnnnnnnnnnnnnnnnnnnnnnnnnnnnnnnnnnnnnnnnnnnnnnnnnnnnnnnnnnnnnnnnnnnnnnnnnnnnnnnnnnnnnnnnnnnnnnnnnnnnnnnnnnnnnnnnnnnnnnnnnnnnnnnnnnnnnnnnnnnnnnnnnnnnnnnnnnnnnnnnnnnnnnnnnnnnnnnnnnnnnnnnnnnnnnnnnnnnnnnnnnnnnnnnnnnnnnnnnnnnnnnnnnnnnnnnnnnnnnnnnnnnnnnnnnnnnnnnnnnnnnnnnnnnnnnnnnnnnnnnnnnnnnnnnnnnnnnnnnnnnnnnnnnnnnnnnnnnnnnnnnnnnnnnnnnnnnnnnnnnnnnnnnnnnnnnnnnnnnnnnnnnnnnnnnnnnnnnnnnnnnnnnnnnnnnnnnnnnnnnnnnnnnnnnnnnnnnnnnnnnnnnnnnnnnnnnnnnnnnnnnnnnnnnnnnnnnnnnnnnnnnnnnnnnnnnnnnnnnnnnnnnnnnnnnnnnnnnnnnnnnnnnnnnnnnnnnnnnnnnnnnnnnnnnnnnnnnnnnnnnnnnnnnnnnnnnnnnnnnnnnnnnnnnnnnnnnnnnnnnnnnnnnnnnnnnnnnnnnnnnnnnnnnnnnnnnnnnnnnnnnnnnnnnnnnnnnnnnnnnnnnnnnnnnnnnnnnnnnnnnnnnnnnnnnnnnnnnnnnngatcctgtactctaaatagatagggcaatgttcaatgtactgctttaggagcttggcgcctttgtagaatgtgataccgcgaagcttatgccaagctctgtcgaaaccctggtgcatctgctcgtcatgaaccaagttgaaaatttcctgagtcatggatcggggcagacacagactctcctcgccgttagaatttgtgaaaatgatcaagccattctccaggtggtagggtaacttcttaacttggggatcctgctgggcgtcaacgctttctagagtgtcgattagggctgaccagcgagtgtctgactggtatcctcgtaagatgcgatccttagtgtcgtcgcttagctggagcaccgatgctgtaaggaggtacgctgtgggttggtctgctgtaggttgttcaaacacatacggcgctgggatatcctcgagatcgtcttgcgtgccggggactgacgggtccgtacatggcaggcgggaaagagcgtcagcgatcttattagtttttcctggtctatggaagacgcgtaggcgaaactgttggatgaactgggacgcacggactaggcgaagattttggcgttctaaagaaatagaactcaagtttgtcgctttagcaatacccacagtgctactatggtcggtgtataccacagccggaaggtcgctaggacaggcctctaccaagtggcgcaccttgcggagggtccagcagagggcggaaacctcgagctcagtgggccagtaattcttctccgcgtctgtaagaagtcggctgaggaacatgatcggctggatctctgtagcagggggtggttttgaaacgtccttatgagtgaacgtcgtcttcgtatgatagattgtggcaccgtgccctgtttcctttgaaccgtcggtatcgatgtagagctggcgtgtgggatcatggtgtgctagccatttaggttcgtggaactcggcctggagtagacgaaaactctcgagctcagcttgggagggttcattgagaatggcttgcgcgctccacgctcggcgctgggggcctttgatcgggctccctttcagcaagtttgtcttgcggacttggagtggttccgatttctgtgcgtagcttttgatataatggcgaagatcacccgtcattccaaggtatgtttccagctgcttacatgtgcgcggaaaaaccagtgaggttatcgcctttaccttctcggcggttgttgacatgcctgcggagtcaatgtccttgcctagcagggtcaaacttggaaacccaatacgcgctttcttcgggtccagagtgatattgaattcctccagttttgcgaacagtaggtggagtttagcaacatgctcgtcaagcgtatcgccgaccgcgaagatatcatcgacgtaggttcgacaccattctcgaaacgcgcggagtatattgtccatctggcgttgtacgtaggcgatggagtttgaattgcccatggcaacgacgtggagaacttcttgaccgcggtgcgatatgacagcttggtggccataatagtcggggtggatgcgccattgatagaagaattttgccgcgtccacgattgtgatgaaacgcttgccttttgccaaagcaataatctcgtcttgtcctggcaatgggtataggtctggaaccaagttcttatttgtcgggcggttgtcgaccacggcgcgaccgacccgttggagcttggcgttacccttgtcgtctgtgcgagtgacccatttccatacaacaaaaacagggttcacgccctgggcttggtgtttagcaaacgacatctttccttgagcatgtagagcatcgaatgcatcgtcgatgacttgttggctttctctcgcctgtctgtagacttgtgaacgctgtggctttgaaccagggactgttgggagtctcatccattcgtcttgtgggatgtccacaacgccggggttagaccaaatgttgtattgctcacaaacatcgcggagcactgcagctgtttcaggcgtcccatagattataatgccattaggtagtactgtttccagtggatgtcccggccgagcgtaggctgtagatgttggcaggaccttctgcatgtccggtgtgaaaacagtatcaggaagtctatcaggaagtctatctggcagccggggcaagttgtcaacagcggccagataggcagtgacagagtcgtgaacgtctcgattaatcaatggggggcggggctcgaccgcttggggctgcgatgccagaggcgtcacttcgggagaaacttcttggggctgcgatgccagaggcgtcacttcggtagaaacttggtaggcggatgtgaagtccggctctaaaagttggcctacacgatccttcttcctgatgacttgtgttcggtcggtgttgttaacggcgtgtatatatgcgaaaccggcgtcaaccatctgtgccggaatctcaaacttgctgttgcctggctcgaaaacgaagtcacgatccttcggtaaaatcgacttcacgacaatggggatccgtgccgcctggcgtggggggacctcgattttagaagaagcgtagaccggtcttttactcacgtggtgtggttttgcgcagagggcaataggaaaagtcaagttttcgcaggactcaatgatcgcctgggaacgcgggaaatcgagtataaacccttctggtcctagaacatccatgccgataagaagctgggcacggaggtcctcgacgacgtgggcctcgattcgtagctctgcggccgtatctttgttcaggaagtaaacttgaatcacgatgtagcggtcggacaggtgttgggaaccgatcccactcacaggaatcgggctgatagggtactgggggcattggagtgatgccgccagctttgaatcgatcaaagtcataacacatccggagtcgaggcagcaagtgtttagcttgctggggcttccaagtccgactgtggccgttgtatatcgccaggatcgaaatgtatagccggggacgtggtcggtctgtctggccgagtggatgatgcgatgagcgggattcgcgaaattagcgacagcttcagctggtatagcggcagcagcttgaggcttacagccgtcaagatgctgatacagcttggtgttcgacttgaaaacctgtaaacaggataaacaagtgactgagtactcgctgtcgactgtacatagctgggcctgtgccggcggatcggcctgggctcgaaaaccggattggtggtcgtcgtcccgtaggccggcagggtcagcgaaattcgcaccgtacgggtcctcgtcggcgtaaaagtcgtcctcgaaatcctgttgatcgtcgtcgttgactgggacgtcgtcctgatactcctccaggccattgtcattagcttgggagtagtcattcgactgatgatagtcagtatctgtatccacgtggtatgcccgctgaggtttgttccaaacagcacgctgggagttcccggagccgttgcggccggaccattggcggccaggattgttccaggtctgctgagcttgaactccctgctgtggacgttgttgtctctgaaaggtttgggggccttggttgctttgtgctgggttctggggctgatactgatgggactgatattgggctcctgtggcttggtatgggcgctgaggagtctgctgagcctggccacggggcgctggagcctgttgttgtctatatccggcctggctttggggtagaccttgatagtcttgggctggcgagcggttgtagccgtacgggcgctgagggtagccttggcgctggtcttgtcggtgatatggggccgaattgtcctgtcgcggcctattgtttctaaacctggtagtcaactgactctggcgcttggttgccatatctttccagtcttgatagtggtggtcaaggctgttcatgaaagtgactaacgaggtagtctcagttggctctgggatgtcgcgacgaagcgtaggctctaggttctggcgaattcgtaataactggtcgagaacatctgtcgtacccgtagctttgcataggcgtaacataccctgcgcatattctcttggggtgcggcctcggcgtacgtcatcccattcgtatgtgtgcttgtcaagctggagaagggcctcggtacggttgggtctgaaacgccgcgtcatcatggaaaaccatccatcctggagcggaacctggttcataaggcgtttttcgtccgtggtcagctcctgcgaataccatcggagcgcgtcacctcgtaggcagctatggatgttcgctcggacaacagcttccgacttcaggagtattaggtctgtcatacgatctacaaacgtatgcacgtcggagtagacgcaaagattttggactgtgtccattccatccttaaaactcttcgaaggatcgaaaacgccaatttcggacgctttccacgaggtatcggtagtagccaattggcctggggaaccttgctcgccctggggaccttggttaccttgaggcccgcgaagagcgttggcattgttccgaaggcttgtctgtacggctttctcgataagctccgtaaactgtgccatatcgaaaccgggcaacggtggggaagcagccggagttggcgtgtcgcctgtgtggccgggaccctgatttccgttgttacggctgggacccggacctccgttatttgccatttttcgcgggaggtcagagagtttggcttcccgcagcaggctcgatagacctgctatggggctggcctcgctgtcgtaaaaacgtgaagttaatcgtactcttgactgtaccgggggtcgttccggggtcaggtgttcaatgccggcctcgtgagagtggaggtccgcttggtcgtcttcggcttgttcggttcccggagactggacttccgcctggtcgtcttccgcttgttggtcttccggagactggacttccgcttggtcgacttcggcttgttgagactggacttccgcttggttgacttcggcttgttggtcttccgaagactggacttccgcttggtcgccccgtagaaggtctgcgtggctgtccttagcctgtggtgcggaattttcgtcctcggttcggaaaaacttgctgtcgtaactgtctggccggggactgaaacgaggctgccgtcgtgtagtagcgggcctgtgcgcgtagcgtatgacagcagtagcttgggcagtcggtcggtccgaaatgggcgtcgaagactggggtgtggaaaggtgtatcacagcagcaggttgggcagtcggttggtccgatacagacgtcgaagattgaggtatggaagccggtgaactgggaggcttgctcgtagttcgcttaggtcggggtctcccgagcggacacgcaggctcgctcgacagaggggttataggacttggaacggcgaggtgagacgtcagacggaggaaatccttgacggccttgttgagtatagacctgtcgatgggccaggaaggtggaaatggatcctctgaagatggaaggatgacggaagtggatggcgaggttgagggattggcgggcccggcaggtgaaggggtcaggatgatgataacgcgggaaagtgtatctgcgtcgaaatcacctgactaggggcgtgcctcctagcgataattgtcgaactggattgcaagctgggtggcccgacgagtacgcttatccatggattgttatagtagcggctcggcactgtgatcgacagccttaccgtagcggcttggcactgtgatcgacagccttaccgtagcggcttggcactgtgatcgacagcgtggtcgaccgccgatcgtgccaggcttggtgacctctgaccttggcatataggggaacccctgaggtggtcgaacttgttaaaacaaacccgagagagatcctctcggaagaaaaaaaactctggatgaaaccaggacgtgctaccataaatgtggcaagtaagcttggtggggaagatgatgatattatgaaccccttgttgggggtgctaactagctaactatgactaagctgtgacacatccgatcttatcgaggaccgtataaagcgaagtttttctttctacttttttgtatggcctgatgagcataatattagacttacaacaaggcagatactgatacatgtgacgtcctgctggatctgaaaaactacatggcctgtatagtcctcgactcgtacgttgtacttcggaatagcatcggaagtggacatacccacaaatattagtcctgacagtcacctatttagggatttatatactttattttctaagttcaaaggagtccttgtcacatgggttcgatataccttattgtgtacaaaataaatgtcccttcaatacgaagtataatttgaccattttgcctgatatatattggttttctttttaaataatcttttgcaacatttgtatttgaagtttagaaaagaacccattcggaatcattgctagctgcattgggttgcaaagcagttttacattcgtagcgtcattgacaaacacatggctcatggtaatattgacaatctcgacagctttgtcgatgatgggctatgtatcaagctttcatcgttcctgttgagctcttgtgtgcatggaaaagaggagaaaagagatctgtcaatagcatagatgtttttagaggatgcctttacagttggcttatagttttcaccggtgccttcctgctcacatgtgttttgttcatcctgtcctcgttgatttattcctcgattatcattgtcataaacaatagtcttcttctctgtcctttatatgagacttctcaggcataatagtctactcctttgtctgggcaaagatatctttgaaccctttcaatttctgaggaccaaggatccgcttgccagagacttcgtagttccattgcaaaccgttggtcataaacctttacacatttccctcaatgtctagatcagaaaggtcagcatcaaacgaaatgaccatcagatataatatattccagggttcaaagtctctaacgattgtgatttggactaggcgaccctctagctccagtgtgctcttcttgccggccacatatgatatgagcatctaaaatgtcagactaaatcaaaatcaagaagctgcaaactgaccacctcagttagcctattcatatcagttctcagaggaataccgtgccaactatctaatgacgtctccctccaggataacaaaggattcttgaaatcaagggctgtacactgagtatctctcatgctaggtttctttgtcattccgaggggtagcactgaaacactgaaaggaaaagaagccgaaggaatccagaagtcatcgatccccttggaagtatcagcactatcagctttatagattgagaattcaacttcaaattagagtatgttatccatactgtttctcacaatgaaacttctacctgatagtatatactcttttaattgccaagtgaagttatcatcttagggaaagaacacaaaattttacgtgcatagtctgcttaggggcgataaaactatattttgtttgttatagagatgacaagccactacacccgaggttgaaggtgagccttgagaaagattatagtcaaacttgtgaccttagggtgaagatcccctaatcatccgatcataggattttaaccacatcttcttcaatgtagatcactaggaaatcaagcttgtgtgtaaaaccaaaacaatgtgtacatggcggtgaaaacatctggaatcccccgcctaccaaggttctaagacccagtgtatacaacgacatctcacggatagcacccaagatttcgattctccatactagcacagtcatggccgactcaacgagatcaaaagacagtttaccacctcctccacctccgcctcccccagagaaccctcgctcaaaaatatcccccacagtcctaaagatgcgaagcacatctcccagccacttctttcagccccaagtccgccgatctcaaaaccaagggcctgctccaacaggcccatacttcttctacggctcactccaagaccaaaatctactcatagagctgttagacctaagccacgccccccacctacgacccgcgtacatcgagggctacaagcgtaagctttggggacactacccagccttgctctctggtgatcccgtggatactgtcacgggggcagtgtacgaggtacttagagttgatgacgcgaagaaactagcggcttacgaggggcctagctacacgactgttgcttgctcaatccggtatgcggatggcgaatctccaatacaggcagaggggtatgcgtttctctttgtggggaatacgcgtgatttaagtgagggatcttttgatttcaagctttggttagagaggagggcattgggaaggaagagctgaggaagatagtggcgcggggtgggctcatacttcggagtccgaaacgggaagttatagactgtacgataatacagcgagtcaaaaaacatcagtttctctgcttatctatgttagtctgagtcagatggactggatattgtactgttgtaagcaacaatcccaaggaagcatgaccaaaatagagtatgtgcagaatcaagttgatgaacatcgcggggtaaacagggtaagcgacagagaccgaccaaggcacagacaactcggagaccaacagaggggcaagtagaagtagaatcctcggctgcagcacgattgaggggtaacaatcgtacagaatggtagaatgatatagaaggtgacatgcagggctaagtcgtcacccgcatctacttcccgcacaataggggggaaccttggaagggaattgatgtccgaatcgagaacacccgcaatgcctaacacacagaccctgataaacaagtcaacaagaggacaagcgcacaggtggcttgtatgtcgtacatggacctcgcactaggtgcattcctcgggtgtattcacacggcaacaggggctacttccaaggcaggtgtcaactatgcaggatttgcattctaagatgacgatgcgaatgtggacagcatagtttggagtctagtttcaattaggtacaatatatacatgctccttagcatacaacaagtatatacggagtatggagtacggagtataggaataatagaaagccaaattccaagaatgtcaccgataccagtgacgtcaagggaccagcccagattatagtgggacccgagggagagtggatgtaccggtacctagtacacacatatcatactcgatgttggatgctgccgggttcagctgactgacgcgggggcaaatggagattaggaggtcacagccatgcgaataagaatgacatgtacatcatgagttccaaggaccgtgggaaggattgaggtcgatgatccacgtgccctgaatgacggttatcagccgatgatagggaaaactagggttacgccctggagcgctgcaagcgttcattaaaagcgcacgagcactcaggatcaccatgactggccgataacgacttggcatgaggggtttatttcgttattactcaggtatcttaggggggtacggggtaagggaagtatttccttgtatgaataagaatgacatggagagatggtgtatgaggtattcatcttaagatagagactagagtaatgtataaataggtgtaatagtgatagttaatagctaattgttaagttaatactttaatagtactccgtataactactcctatactcctataatagggagagccggatgcacccggtgtcccacgaggcgccaatcaattcacccacgcgctttcccaatttcatactgggggggttaagtacaaaggtccaagtcactggccaagtcacactttcaacttatatttccccttcctcgactactcccccccctgttggactggacaactcttcgaccttttcttggaatccgctcttatcgcgactatctgtctccccttgccgcgcatcccctacgtggatccaagccctaaacaaagttggccccaacttcgctacacggctacacggctacagtgtctccttggtcgcggtgtgaaaggtgagttcctttgttttgacttcttgggctctttcactctgaaaccatcctgttgccacctgatctttccatggtacctttgtttgagaccgtcttctgactcatatactctggctcgcgcgctttaggttcttctcctttcacaaatccatcttctcttcatcatggctttccagacaaactccagcattgcaatggctcttgctggcaagactgcctccgttgatatccctcagcgccgctctggtctgagtggcggccgtgtccctacgcgtcccggacagcctgcgatgctgcccacgccacctaactctatatccccgaccctccctcctcagaccttcaagcaccgcgcgacactgtcgccaggatcgccgctggccaccgtcccccagttggactccgatatcgatctggaggatgcggaacatgacaacagtcatcacgtctccctgcctgtcgaggacctcgacagtactggcgcgatcacccctgtcatgcttgcgaagtatcatctccctgagatcttgctgcaccaggggcccttggctatccgccacgttatgggtcatctgacgacttccgtccctggcttttcgcatatcccccctgccaaggcgcgccgactggttgttgcggcgttggagggtcgaggaaatggaggtgtccaaggcgacgtggtgttcgagaaggttggttggggccgctgggacgcgcgacgtcgtggtgaacctgctcacgatcgggatttgaacgatccgtcgtctcctccctcaagtgttgcaggctcgttccagcagcgtggcctgcagattcagggccagtcgggtcggcagggtggcaatcatcatccctaccgcatgagctttgccgaatccacggcattctcgtacaccgacgattatggcatgcatggagacctcgatatgttagaacacgaggccgataagatgtctctcgatggcgacgacggcgaatactgctcttcctccgaagctcccgacgagatgcaagaaaccgagtgggtcgaaggcgatgacactgatgaggaagactgggcacaaattggcgccgacgctttgcgcgcccgttcgatgaacaacaacggcagtttcatcaacggccatgtcgctgcgcgcgcaaagcctcaaccttccgggattttccccgccacctgtccatctgtggctaagttgccaccccgcacctttgacatccaggaacgcgccgctgtggaggcgctcctctgcctgggctccatgtaaagcccctcatcataatcggcgttatatttatttctactctttgcgcgatacacttctttcacattcaaggccgtcgaagctggtctggaccgcttttggcgttccatggtttttcggcaaatatccaaaaaagtcaaaagccaggaaatttggctagcttgcagtgcaactacctcgattgatgggcgttgggttggacctttgtggtattgggtttccaagatggcgttcaagtctgcaccttcctcttatgcctgctacgaaacacattgtcatgacgattcagggtggcagtttcgtcgctgctaccactatgacaactccaaataccccttatcttctccgctctgctacttttacgtgggttggctcagtattattgtctgtcacctactcattctggcgtttatccttgcattagttgagtcagctaccactgcttcaagactcctatgtttcttttttcatccttcgaccttttttaatactctactttgtctttttttttatatatcagcttgcacctcccgatcacttggaagatctcagccatctggaggttctggtcgtctttattgatcgcactggctcttctgacttggatggaatctcagtcatcttcactgatccaactgagaagttgtcctcttcctctgccctgtttctctctctatatatatttatgtttatctttatgtgctctacacataatctgttgtacattgcagattcatcatccttgcattaccctggaggttttggcttcagttctcgaggctgaatactttacgcggatgaaagtacataatcacttagctagtttagaaacttaacgcgtcgcatatcctgcgcagttcagttgccatttttctctttcatttgtaatctaagtgttcatggtatgtacttatactcatcccaagaccttacaacgtcgtagatgtaggctgctgcctgcatgtcctcacacttgagcccaagtatcagagctttaccaggaagaacgtagtcagaactacactccagcgccactactcaatttcaagatgcaagtccaaccaaagcattggtattaaagatatcattcaaactaaactccaagtacaattcccaagtccataacccaattcaaaactgccatcaacacatgcaaatcctcctccagaacccccataataagacagactccaacctaacccgtccatcccctaatcatgaatatcattaatcttcttccaaacccccttctcaacctccgccaacttactcccagaccacctcatccaccacttcgccgtaccgacgaacccctcctcctcttcggggaagatactactcgccccgccacctgacccagctccagacccagcaccagcaccgtagtgcagcggcagagtctgcgtctgcgatcccgcgtgcgtctggtacacagacgaataaggcgtggaggttgagttcggagtaggctgcggcgggttgtaggagtatgactgcgggtagtttggctgcgttggctgggctgtctgggttggctgggctgttggtggaggcggttgggggatggcttcgccggctttgggaggaggagggactagagaggaagatgctgttcctggtcctgtgtatgctgttcctggtgatgggcgcgcgccaggttggggtgcgggtggattctgggttgtggatgtcgcggtctccgggaaggaggttgttggtgttggttcaagcgcggttgttgctgttgatgttgctgttggggttggctgtactgctgttgcgcctggttggggtggtgctggtggctgggtggttgtgtagattggaggatttgagggagctgtggctgttgctgttgttgttgcgggtgctggtagaggttgggagggtgcgcttgctagtgactcgattgctgtggcgggttcgggctgcgaggttgttgcgtgcgtgccttcctcctccttgttggagttcacgggcgcggagttgtaggtttggatacctgttggggcggacattttagaggttgatgtacttattgttctgggaggcttaggtaggggagtgaaggagctttgtagcttcaaggagcttagacgtcatgggtattgccgctgtggagcttcgccgcattgggacacctctcttttctttcttttttttttgtctacctacggttcagtcaagtattccgatgacaaaaattattggggctcgaatggttggctatttgcttgcgcttgtttcagttatgttcgcatagctagaagcatccagcatacaggcagccagccctcaattggttgatctatcaaaactaggccagcacaaagaacacgtccaaggtccgaagctagttggtatctgtatcttagtagaattatttatttactttcacaatgtttacgaagatcaagttgaaaaaacgaaaatagtttgctggcagtaaagtacattgggtacaaaaagggaagaattagaccattctatgcttcaagatccttcggacccatttcttgacgcatctatcttttgaccatcccatatcctcaaattccacgcccagtggttacactgggggaggtgaacaccccctgtttcagtataactacagtggcaagagactcacgtttcagtgaatcgcttagaacttctttccgaggaggaggagctgggccttgtcgtagatggacaggacaccggcaccggcgacaccacggaggatgttagcaccggcacccttgaagagagacttgaagccctccttggcgatgatctggcgggcagcatccatggagctggagtacttaacggcctcaccagaggtcatcatcatgcggcggcgaacggtgtcaagagggtaagaggcaacaccggcaccggtggtgacggtccagccgagcaggaaggaggcgatgaaggagccctcaagaggaccaacgaggagaacgggcttgatggaatcgtacattccgaagtagagaccacggtagacgacaattccgagaacggagggaccgaaaccacggtagagaccggcaataccgtcggaggcgagggtcttgcggtagacatccacgaggccgttgaactggcgctcaccggtacccttggaggacttggcgtcgttggccagacgggtacgggcgtagtccagggagtagacgaagaggagggaagtggcaccggcagcctagagggtttgttagctgtgagccgtgtgtgagagttttcagatacgtacaccaccggaggcaaggttgcccatcatccactttccgtatccatcacggtccttcttgtaggcgaacatggacttgtaggtgtcacggaaagcgaagttaagagcctgggtggggaagtaacggatgacgttggcagtgttaccacgccacaaggagacaacaccctcagcggcggaggtacggcggaagcagtcagcaatgccgttgtacttgcggtcgagacgaccctgcttgagcatctcatcctatttatcaaattggttagatactaaagtgatgaagatatcgagctgccgaatggcacgggccaagggagaaaatttttcacgagttgcgatcgatgcgaaaacacaactcatgtccaattcaatcacaatcaattgttgtgattctctgcctctggctcattccaatcggtgcatgacgggtggtaaccaacctggttctggatcaggagcttgacacgctcaatgggggcagcagcggtcttggagacagcggcggagacaccacccactaatacacagttagtatgaaaactcgagacgttgaagcaagcaattgctgataatggcagatatcaagcttgacacgtactcaggaagtcgacaacaaagccctgcaaattctgttagcacgactgctcggttcaattcacatcgagaaagcgatgaccgagccttgaaaccgcgtttcgaaacaagctcgatgattattgatggtggacatctcatcggtttgaatcttcacgcgacaacaaggccagctctcacgggtttgcagggaaacactcacgggcatgccgaagatcgacttctcggcctggttaacatcaccggaacccattttgaagatagtgcaaaagaaaccggatgcaaaaaaaaagagaggagatggaaagagtgtcaagaagaaagagacaccggggacaatgaagaagaaaaaggaagagagaaggcgggaaggggggccagaaaaaaaaatactcgaccgccgggcgctaaggcccaatcaggaagcccaggaggtttaattaccgtataatacggttatcatgtcggtactggtttgcctcctgccgatatctcccgatccactgaaaattctgcaatctggccaactggtctggacggtgctatgggcatataggggtctttgttggactgtcaaatggaccacacggttttggtctacaatacagctactccacagagtcacttttgtctctatccttgggaaatcagtcgatatcctatgttttcactgtgatcatcgacatcctgtagtcccgagcaacggcccaagcgtcggtgcattgtaccgtaggggtacggtgtatatttccctatccaatgccgggcctccacctcccggggcaacctcctttttgctggccgggtatccgatggcgaaccagacaaatgatatctcggacttgccaccgacgggattatttccttctagccctgtgttctggggcttttgaatgatttcgaacgtccccgggtgtgccatttgaattcaaacttgagcccaaacgacccgatattactagttgcggagggagtagcctttttcgtattcgggcgagtggattctccccaggtctcctctctacactatcttgttccttcagtacttacttcctgggaatatctaactatggcattgtagcataattcaacaacccaatagagcaaatgtgatccctctcaggtcttgcactgatacggagacgacactgtgatatgtgagggatccctagacttccacggttgatgagacatttttcctggctactatttttatgtcgcgggtacaaaccttaaggtgatagatcgccgcatggacgatgtacctaggtacttcacatgttaggcaatgctaggtacccaatagtacaacattggctccacctcccttggtcctcagtgaaattttctgtatggagcactacgtacgttcaacgcatttcaagctgcatagcaatatttggagcttcctatagcttaaaatcagatttcccgaggttcaccccagcaaccgctagcgcctgagtgggcccgcatcgcatgttagctttccgctttgggagctacggagtcctacaggtatgcatacgcctgaaaaccactagatttggagaaagtctttctcaatagaacttcaggatatgatgatagctgtaatatctctcacatttgaatgacaaactagaggcgcaatttgtgttctatattatagctttcagcgaatatatattccgagtactaccacatcgtatcaagcacgtgctaaccctgtatacttgcgttttttagcacttcgttcatttcgacacaatgattttcgaagttgagatactatcaagttaaagagaaaataattgggttcattccataaattgatttgaaaaaggtataaacaatggtagattgacagatgcaacaacttttaatgcttcttcgacctctttctcttcttacgtgtgccatctccttctctgatatcaaccttatcctcatccacagcatccttaggctgactaggttggacatcaccgccgaacttgaacaccggcccattctcgtcaccgaaagtgtccttgcgccactcgcgaagccgggccttcttgcctaacctcttctgatcgcgccgcttctgctcttcctcgcggaaggtggcgagcttcttcagaccagcgaacttgttgagctgtatgtcgtccgccatgaggatgtcccgtgccgtcaagccaaagctctgcggtgaggtttcgcggtagcggaactttgtggcgttcttctttgtagctccaggaagcaaggtgatgtcgagatccaggttgcgctcaaccgcatcgtcaatgcgaagacggtctttgcgggcctcacgtttctgaatccgcttctcttcggccttgctcttcttcttagatccggaagcctcgtcgtcatcttcgtcttcggcttctgatagttcgactgtgggtttcgcttcttcatcctcgtagtctgggaccaagtccttgatatcgatatcatcatcccaggtaggcttcttaggatgcttcttcttcttgcctccctcattttcgctgtcctcgccctcctccccggcgtagtactcctcaccaaaccgtttttgcatctccgcttcccagtttgagtcgtcccaggaagcatccaggaaacgagaccagtcgtcgtccgtgaattctgaggcacgaagtcctgcaacttccttgatttgctccacctttttctgtagttcttctgtcttcagtttgcgaagacgattcttctcagtttcgcgttgctttttctcctcatccttgagtgcgcgctcagcgtcgcggatcttcttacgggaactcttctcttcgcgacggacggattgcttgttggtgagatcacgagagtgtgtgactatcacctcgttcatcttgttggggtcttcaaatcggaagttgtacgcttcttcaatagcttccgcccgatcgacgtcgtcgtcctcatccgaatcgaacggatgcaactctggcctgtcggtggggatccaggctcgtgctgacaagaagttggacaggaaagtctcggggtctttgtccgcattctcgatatcgagtttgatttcagatttaggcaacgaaatgtcctggccgggcttgcggaccatgaactcgtcggcatcttccatctcttcgtcagacttgtctgccgctccgtgcatctccttgacaatagcattcttcaagtcggcttgctcttgggcataggtccttggggtattttcctcctcagctgggttgacaccactcagaagattttcggtatggtattgtcgcagcgtcatggacttttccttggggccctttccggcggcggcttcctctgggtcgtacttgctgtaaaagctggcatctttgtcgtaaacgcgaggatccttcgaacgaatagcattcaaagtcgccgaaatttcagcatccagagctactgtagcgagctctgcattgtcgtcctcttcttcggagtcggaatcctcagagtcttcgtctgggcggtttccaagactggaggacttgccatacttcgcttccactgtggattaagccaatattagcacatgctagagcgcaaacatttcgagtgtaagcacgtacacctcgcaacttcttctctcttcttgttgtgttcaaatcgacgagcgtaatcttcattgatcgtgaacccggtatcagacgactgcttgccgaggagaactccaccagcatcgtccccagagtcactatcgctatcttgatctaagagctttcgcattttcttagaaggaggctccattttgtgtgatcaggtatgtgattgaagaccgactcggcgaaacccccaattggcagaaagaaaaaaaaacctcacaccgctctccacattaaaaccctcgagaatcaggcaccaaggcagaaacccaatccttgacgtagccaattagatcatcggggggctcatctgaacaggtctgaggaggtctcaggcaaagccgagaccgctacaagccagaaaatcatacacgtgggttctctccagggcttggaagttgaattgatcaccaagtggcatgaacgagaggaggcctattcacacctctcgcgtctcggtctttactcgcgttaagtgtatggccggagacatgcactagatgtcgactcaagcacaaaccccgttaccccaagttgggaaacttgtgagcgttgtgtgagtatctcatatgcctgatattggaattctcgttcttgtatactaatgcatgcgccccttttcagcccggtcggtctcaaagaagccgctctcgactcgcccacctttcgtgccaccaccctttatttctctgatcagatcgatttcatagagaaatggctcgacggatatgccaaagctgcaaccaagctctcctacgagctgaccgctatggagagtgtagtgaacaactttctttcctactcgacacatcccctcgtggtctcggaagcggtcgttgaccatgattacacacttttggctatgaggagatgtggtgaggggtctaaagatctttggagtggactcatcgcaacaaccagaaagttggagtcgttgatttccgaacctattcgagatttcattcaagaggatctgcggcagttcaaggtattaagaagcccctcatccaatttgttctcggattatctgacacgtccataggaaattcgccgcaacctcgagcaatcacagaaacagtacgattacctccaagctcgatatgcctctcagtcgaagtccaaggaggcctcggccctgagagaagaagcatttcagctgcacgaagcccacaaggcctacctgaaagcatcaatggactattcagtacagggtcctcaggtacgaaatgcactggaccgacttctggtcaaaatctcctgcgatcaatggagggaattccggggatttcacaatcacaacagcgggaccttctcgaaatggtcgcgtgagatggatcgtattaagggttgggttaatgagatggaaggcagtgagaaatcatccaaacgagagctgctagccacccggaagctcattgaggaagccgcggagtttgcggctcgaccttctcgtgaactggaggactacaatatttcgaccgttccgtaccttggctctcgtcctatttcggcacttaatgtgagcaaagagatgagaccagagaagcaaggatggctgtatttgcgcacattgtcaggaaagcctactcgcacaatttgggtcaaacggtgggcttttctcaagcacggcatatttggatgtcttgtacagggctctcgtactggcggtgttgaagagagtgaaagaattggtgtattgctttgcagtatccgtcctgcatcacaggaggaacgccggttctgcttccaagtgaagaccaagaacaacaccattctacttcaggcagataaccagaaggagctgatggaatggattggtgccttcgaggcggccaaacaaaaagcactggagaaccccgcaagcactgatctctcggtttctggaaaagtcacagttcaagaccctgcattttcaatttctcaacccccggctgcggagttcgctgcggatcctgctgactctcttacccctcatacgaacgatgagtccggagcgggggatcgcagtatgacgcttcctgttccagaccgtgatggatataccatgagaaatagtaccgatattggaagcagcagaagaccaacaggcttcgatagtgagagctctgcaagagaacatgcaaaagagcatacctctagactcatccaaaagttggatcttcaccgcaaatcgaacaatgcggctccactatctccttccgtccccggccctgcaggtggaatagccagtctcatctctgccagccacaatattctcccttacagcaacgccggtccactcaacgccaacgtcgatggcagtcgaggtcgcagtttaagcaacgtggatgatcctggctcaagtcttgcacctgccacgctcgccaatcccccggcacccacaagcatgagcaaggcggcagtggttgtgagcaatgaaagaggtattggaataggcgtctctgatagtacgggtggtatgcctagtggtatgatggcgaacgtgtggggtagctctaactggggtttcatgaacaagcttcgacgggaccaacaccagattgatggagtatctgatgggccgtctacattgggtgatggctcaacacacacgattgccgcacaacccgatgcagcgggtactttagtggcaccccgacagcaatcaggtccacgccacaggcagacagtaagccttgatggggacgatgttaagctcacgcaagttgcactgggtatcgggtatgaatatcccagctactaccctcaacaattgaggattcaagatgctcagttcagattgcttttcccagacgtcaagagagtggaagcattggtcttggtgttcagagccacctggagccctaacgaccagcaagaattccccggacgagcttatgtcacaacaaggaacatttacttttatagccatcatttcggactggttttgactaccggtgtgtctttggagagcattaaggaggtaactgcagctcctgggcgagactgtgacttccttttccttcatactattccacccctcggcagtgatactcctggccgggttacgatcaaaactttccttgaacctctccgacttcttcaaaaacgactcaacttcttgatccaatgctccattgccgtcgagcaattgagtttagaatcattgatcaaagctttgatcaagatggacactgggtcttcagcccgaacttccagtgcagatagctgggatgatctttcatccggactcgcaggcatcaaacatgacgggggcaaagctacagacctgggccatgcgaaggacattcgactgcctatttacgttgacaaagatcttgagctggatggaggcaggactgcccgtggtcgggatattgctaaatttagacttccaacacaacccgtggagtatgttccacaaggcgatcttgtcttggtgaccgaaaaaattctcgatataagccctaaagctttgttccatatattatttggcgacaaaagcgccgtgtggcagcttcttttacacgagaggaaagctctaggttcgtttattctaaatccttaatcacttatacatggctgacatttcaaagagatccaacaaggcccatgggctagtacggacttgcggcatctgaagcgtgacttccactacaatatcgccacgacagatatccttggtaggcttgattattgatgatcttgagatcgagccatgactgattttgtataggtcgtactcacgaaaatgcgatatcggattatcagatcattgatgttctcaacgaccatctgtgctacgtgatcacagataaaaagactccgtggcatctccccttccgccgttcgttccggttggttaccaaggttgtcattacattccaggccaagtcgaagagcaagcttgctatttatacgaaagtcgagtggctgtggtctccctacggcctcaaaagtgagttatcccctcccatccctcccattcgaatattctaacatacctagacgtgatcgacaaaaaagcaagtgaagatctagaacaagactccttggatcttgtcgacctagtcagtgaccaagtacgtcgattgggtgcacacagtcgcaccaaaaaagccatcacgatcttcggccatgttggacgccaaaacaacgtctcccaatttagtggcgctggttccaacctgaagctggaacctcgcaagccccgaacacagcgtgctatgcacgaccttcttttcgagaccttcttgtcattcctcgaaacgagtgtttccttcataatggtttgggcgtttgacgtagttcgctggtcttggaagaccatgagtgctcacaagatcatcctgaccatgttggctacaagtgccattttgaatggatactattcttcgcgggatagttgggactggtggcacgagagacatgcaggcaacttcatggcacggctgggtgtacagccaaacctcgttatgagcaaatctatctacatgcgggatattgatgacgcggttgcaaactccacaatttggcccggcgccggcaatgccagtgattgctttgctaccttccacgagcagaccatgcggtatgccgatatgcctctgtcgctcagtccatccggaccccgggatgcattgaccaagagcgccatcaaacgcttccagcaaactcgtgagcgccttggcatgtatcgacacaaccttcttgtcgcattgcgtgtcgtgaacagtattgagaaagaggtcgtccagacggaatgggagcgttggctgcgcgaggaagtccggcgctgtcgccaggtcgaggttctccttggcggagaggccactccgggcgacgactcgcagacggaccgaacgaccaaagctgagcgtgtctttgccgagcatgctgacaacgtcaagcagtggcatgaggagtactgctcgagttgtcgaatggagcaagaacatgtcatatccaatgatcctgacctaattccttgattttcttcctacagcagtttccgtctccgagcatattgtcaagccttctgtacagccatctcatttcttgcttcttgcttatcactataccctgtggctagctgatcatatgtcaaaaaaacttgtgtataatttcggcgcatatcatacaagtcgtcattgctttgaatgtgctctgtatatctgtataccacatggataatgtcaattcactgcttttttgaatgagtattcgtcacataatttagttaacccgtaagggttgagaatgcaataggtttattatgtacatatgagaaccatcaatatccacgcactcagttctgcctcggcttcacctcaccttcatgcacaacataatatgccaccgtcccgtccccacccatccccttatccaccatagcaagcaaaaacctttgcgcaccccattctttggtcaaacgagccttttccttcttatcatagtattgagccagcttttctgccttttcaggattcagattcgccgcctccggctgcatgcttgtaggaccgacagatcgatcatgctctttagccttttgctcgaactcaggaagccggtcaaacacagcacccatatgacgcaaggtccacggctgaccctgtgtagttggtaccacgaaaatccgctccggcttcaggtcctcatcgcggattccgttttctagcatgtacagctgctcatctggatgtgtgtacacgcggtgtggggggtagccagatagcagagggattggttcttgtggtgattggcggggttctttttttaatgtgtttgagtcgtctgatcgtccaggaatgatgtctcctattatagaggtccagaggtgttggtgttcgaggttgtgctggacctgggcggatgttgcgaggtggggggactcatggcctttttcggtgatgcgttcggtgatcgccgatgcctcgggctgtttagtgacttccagtatgtctgccatcatgaatattttcttggagctttttgtcttgttagacttagcagaggagctccggccgaggatttttgggattcaccgcctggatagatctgatttattgacaccgctttcctcaatgggattgtatagttgagataagaggcttggaggctcctaggttagaagagagatttggaatgataaaatgaagaatggcaagtcagatatttcttccatctttgcaccgtgagttcaagtaaaaatagaacagaaaaatttatgtggggtggcgatcataataaggcgaagtaagaacacatggcatcttgttgttttggtttcaggactccaggacccgacaacctaggactatcctcgacacagggtcatttccccaccttttcgcatagtttatatcgccttgtcttgttcgagtcgcttggattttcaacttgtattccgccttgattacccgcaatgggacgacaaaagcaaggcgcgccgctcaagagagccccttcttctcaattaatgcacatctcagaagagtccgacgtgggacaaaattctggaaacaatacagacacagtctcgaccgccaagggaagcgtgtccgaaaaagcatcagcggccctggagacagtcaccgacagccctgggctgacgcaacttgcgatttgtgttctcggtatatatgcggcattgtaagtgcctccaccgctaggactggccggagaaactaacaagacgaaaagcctctcgtggggtgtgctacaggaggcgatcacgacaaccagctatctcgttcgtcctgcaaccgttgcggagccaaaccctccaacggagcgattcacctactcgctggtgctgaacacggtccaatctctcttcgcggccatcaccggctttgcatacctactattctcaacaccgagtggccaaaaaattccatctatcttccctacacgccggatcatcgtccccctgcttctagttgcaatctcctcgtcacttgcgtcacccttcggctacgccagtctcgaacacattgactacctgaccttcatcctcgccaagtcatgcaagctcctcccggtgatggtcttgcacctgaccatattccgcaagagatacccactgtacaaatacggtgttgtcctgatggtcactctcggcgtcgcaaccttcagtctgcaccaccccggaactagtaagaaagtcgctgccaaggaccagtctggatcctccggctggggcatcttcttgttgtcaatcaacctccttttggatggcctgaccaacactacgcaagaccacgtcttctcctcgcccaagctgtacacccgcttcaccggaccccagatgatggtcgctcagaatgttctctcgaccgttctgacttctgcgtacctcctgatcatgccgcatctctcacagagcgggattttgcacaacttcctgccattccccattcccccgtctaatgagactgaactgtttggtgccttctccttcctctctcgccacccagaggcactgaagcatgtccttgggttcgcggcatgcggggctgttggccagcttttcatcttccacactttgtctcgtttctcttcactgttgcttgtcactgtcaccgttacacgtaagatgttgactatgctcctcagcgttttctggttcggacattctctgtcccgtggccagtggctgggaattagtctggtcttcggcggcattggcgccgaagcagtggtacaaagatcagagaagaaggcgaaagagcagtcgaagattgaggctgcaaagaagaagttgtgagttttttttgcgaggctttatagataagctttcatttgaagagcatttagatttccaaaatataaaccgcaagttacagcctctgggtgggttctcgtttcacatatttttctcgggccttttgtgggtatattcttaaggtgatcgttcgtctttcagaggacgtaagtaatgggaagaagctcacttccgcccctcaaccatgatgatatgatatccaaacccagtcttgacctcggcatacttgggatttcccgttgtgctaatttcaagctcaaaagcaacattctcaaatgcagggtccagcccgcccttcgtcttccatccgagcgaccctcctgcggaaaagagatcagccgtgttactttcgtccctcaaagacttccttaccctgtctagccttatcctccgagaattcacgagcaacctcatcgaacttggtgccattgcgaagcttctctagggcttcttctttcttggcgtgtttctcgcactagatgtgattagaatgagctatataacaaccctttcccctgtccacgggatctggtggtatatcggctacccctcagaactataggcagaggatccgagattgaaaagaaaagagccaaaaaacatacaagaatgtgccgcacgttaatcgactgtgcgcctttcactgctcctccctttccaccttttcccttggcgtcgtcagcagaggcatccttgcctttgcccttcgcggctttggcgttgttcttgggggccattgtggaggaaaggtatcaatgatacgttgttatcgctgtctcggccgttgtttgttcagattgagttgatgtggggtggaaacttatgcctgaggctgtcaggcagaaaggatgtgtgacgtggatgcgggtgtattgactctctgctctaaagagttctagttaggcatatgtatggaattatcccagtttacacattgcagcatcttgatttctacaaaaccattcatctctcctttcccttcgcttacactgccaacccctcatcgatagcgattgctgagacaaaggaccgaagtcagcaaggactagggactacgtatctactagtccgagtttgaaaaccaaatgggatttgatcttgaaaagtcacgcatcatcgcattgcccgaggatgcattctatatatcggacttcattacagaagacgaggaggactggctacttcagaaggtaagtgacagtgcttttcttgtgaacatgtgtccttagaaaccatgccctaagggattgatgtcaaatattgcactaatatatgtggttatcattatgtcgtctttcttcaattatacctatttagacgttgcatgtcacttattcatgctcagatctcactcactgcaacaattcacaggtaaagtcagcaccgctgccgcgctggatccaactctcgcaccgcagacttcaaacatggccatcagccctcaccaagggtaatgctcttctcgaatcgcccttaccagcttggcttcgatcaccgatcgtcgaaccgcggtttgcggccctgtgtatctttaatgatgcgccacacaaggcgcccaatcatgtcctagtaaatgagtatcaacctggacaggggatcatgccacacgaagatggagatgcgtactaccctctcgttgcgacagtgagtctaggggcgccaattgtgctcaatttgtaccacaaacatgcccagggggacagggaagaaaatgaggcaccagccaagaccggaagggatgttgccgggatacccgacacaaaccgaaggccccaatacaggattttgcaagagagacggagtctcctgatcacgaggggcaagatgtacacagactttttacatggcatcgaggaaacgacgagagatgaggatctgagctctcgctctatatgcaactgggagctcttgcgagagagggaaccgtaccagagcgggtggtatgagcggaagacgaggactagccttacatacagggatgtgcttcaggttgtgaagatggggaataccttgaagtttttaagtgggaggtaacgatgacctcatttccaaattccggttcttttatttatttttagctctatgttagtaaacatatggaatcataaaccaccagtcctgcaccgagtctttgccgaacttttgcgcataccactgcttggtattccgagctgtcagacccaggttgaccgcgacgaaagccaaacatgaaaacatagttttattgatccattcacctcgcggagcagccaacagcgctaacgagagatagatgatgcattctgcgccatagtggggacaggcaaccccgcggaacatgggatgctccggaagggtatattttttcaacgagtagaggtagtgatgggagtcatgctgcaaaccagacgccaccaggaagagcgggacgagaaagaaagtacgcaaacttggggcgttggtcatctgtagatgagcaatggtcaggtttttggtcaacagagtgccggaaccctcgatccaaatcgcaacccctgccgctaggtagaaacccaagcctaacaaccagtgcataaaccacatctgggacgacgagggtttggagaaaacaaagcactcccataaccgccgcgatccttgtatactcaatagaacacaacagatcaccaactgagtcagggacatggaatgacgttggtggtcctcgctgacgcgggatgcaatggcttggaaaaccaaaccccgcgatagcaattgcgcaatccagaagacagacgacaggacagatgcaacatagaaatgagtgaaataactatgtggcacctgccaagtagcaagatagtcaaggaagcccttgctctgggtgggagggttctgggcggtcgatggtgcagagccggtcgaggccgaggccgcgcgtggaccgtaagtgaggaagcgggaccgtagtgaggttgggatgctgatcgagaatgtctgcatagggggtcggcgttagtcgggttcatctgcaggtggtgttcactatcaccactatcacatcgcgtatcgtaccgtggcggcggccagcaggaagaacgcgcgtagagcatccacggcatccatgccagtggcatccagggtgttatctacccattgagagattagagacatggctcttggatgagcgtgttttttcccccgccccttctctttttttccccccgtctctgtttcgtattgtttctttaacttagtgtcattgtgatgatatcagtgagttgttttagggaggtgtttgtggtggagaaacccagcccccccgccgatccctttcgccaacgggggcgttggggggtcgttgggcnnnnnnnnnnnnnnnnnnnnnnnnnnnnnnnnnnnnnnnnnnnnnnnnnnnnnnnnnnnnnnnnnnnnnnnnnnnnnnnnnnnnnnnnnnnnnnnnnnnnnnnnnnnnnnnnnnnnnnnnnnnnnnnnnnnnnnnnnnnnnnnnnnnnnnnnnnnnnnnnnnnnnnnnnnnnnnnnnnaccccccccccccccgccgatccctttcgccaacgggggcgttgggagttagttcggcctcggggttagctcagggataagaacaattagggtagatagaagataaagggccaatttgcgtctgataagagttagctctaagtttcttgtagagatgtttcatgataataggcttcacaaaatacatagatgggccggtgcgctgagtggcgactttgaggcaaatccacttgaccatattgggtctagtctggtcagggtgtttgtcgcatttgcaacatccaaatcgggttagtggccaaaggtctgtgcccccttttcttctcggtatcacggtatcacggtatcagctgtatcgaccgtatcaaccgtatcaaccgtatcgtctcccgtatggagtcttcgccgaacgagaaggacatccaagaacggagtatgaaaaaaacaaaaatcgaaataatcaaatatcaacgcgggttataacctcaccccctctaagatacaagcatgtttccagtagccaaaatccaacctgcagctcgatgattctactgtggccaaacctgccccagtgaggagccctagcccaatgaatccagtcccattcctttcccttcccgcttttcctctttatttctctttcttcccccattcaactcccaagtgaaaaacaaccctcgatttcatcctcgatctatatatccataccagtaaatcctatatccggacctcttcgaccaacttcccgtatcgctcccgtatctcggagcggtattgcccacgtttcaagactctctttgcgggtgaaacccgcggtcgaggatcggtgtccgcgcacaactgctggcgttgtcgaccacggttgttttgtcggtcgcgttttccccccaaaatgacgagcggcatttcaagtcttcgagtgctatcgctatgagtgatgtcgaggcagtctctttaccagctgccctggacgtcggtcagaataggcttgccacggtaaagccagaccctgttggtccttcatcaccaggcaaagctcgtgcagaccctcacccacgggtaaacagcaatggaccgacacgtgtacattcggaaggggaggaggacgggcctcctagtcctagggcggattcggaggctgagacaataatccaatcaggtcgggagtccttgtcaccggagaagaaaaggaagcatatcaaacacgatccgagtcgccatgagcctaacggaaccgatggacatcagcgaaagaaatcacgggtgcttgacgacactcgacaacgcgaacgcgagcaggaacggagccctccttctccaagccaccgagaaatctcgccatcggtggtcaagattgaaaaggtcgatgatacgcagatgtcagaaccggaaggcgttaccaatggagtcgaccttgcgtcagagatacctcgtgctttccgtaagcgaagcttaagtgacagtgctgaggaacaacaagatcatcgtcgcgcacatcctgtgcaggaacttaaacataccaataatacacgcctatccagacctccgtccaacgcgcgatcactctcacccagtcgaccctctcaccaacgatctgcttctggctctcagttcccgaagaaaaaggcgccaacccctgtacttacaggctctgggcgacatagctccgaagacagacaatcgacgtcctcttctcaaagcagttctccactgccgggagcgcatctacggaagcttggttctggagtcggtgcgtccgcatcgcctgctaagcaaatgggaccgaagaagttgcgtgacaagagtggccggactcctcttgcacgagcgtgtgcggaccggaaacatgatcaagtgatgatgcgccatgctgaacgcccagaagacattaatatccccgataatgcaggcaacacccccctgcagatcgcatcgcttgctggcgaagccgaaatcgttaagttcctactagatgcaggctgcgagattaacactaaaaacattgacaaagacacaccgttgattgatgctgtggagaatgggaatgtggaggtggtcaaacttctgcttgatgcaggtgccaacccacggactgtgaatgctgaaggcgatgaaccttatgaactggttccgtcctttgtagatgatgatgaatacgaggagatgcggaaagcgcttgcagacgccaaggccaatttgcggcctggacgacgctcagaggaaaataccagaccagagagcaaggaaccttcttcgcgacgggcttcggcagttagaggatcagcagctagcccccgagattcgcctcccatgcgcagcccccctccagtgggtgtagcaaatcgacggaagggtgggcgaagcgaagctacgagaaatgacctcctgtggacaaaacccacattcgagaatcttcgagagtttgctgccaaaggtgacgaggctggggtggtgagcattctgaatattttgcagaaagctgacaatgcttccttgattgctgcggcaaagggtggccatcacgatgtgctttctcttttgtatgcgatgggcaatgcagacgcggatccaaacccgttacgtggtcagaaaccaggttataacacgcctatgcttgctgcgattggtcgtggcaacagcgctgttatccagctcatccttaaccaacccggattcaaccctacgcgtcgactgtttgaagaaagaacatattttgaactgtctcgcaatcgacagggtgagaactgggaggacgagcatcagattctgaaggacgcgtatgaaaggtttgctggttccgacaagggtcgcaaggacgactcgccccgccgtgctcgtggaaaagagaaggaggagaaacgccccccacgccgaacctcttcctctcccgtcgcgcgtaaaaaaaacaacagccccaacgccaaccgaaatcgtgattctttgaaagacatggatctaatcaaagaaaagcgtcgtcaaaaagagcacgatccatcacgaccatcggattcctccaaacccaaatctgcgttatccgctagacgagacagcgagtctagtggggtggcacccaacgaagacatccgaaagagacgactcattcctggacgtcgtccacaggagcgtaggccaagtctattttcgtctgattcgctatctggacgtgaagaggcaccgaagccgcgtgttgacacagcacttgacagcacaatgtctttgaagcgcattcgcactgatgggtctccggaacgatctcgttcccgtggcacagacgctgaccgcttatctcctgagtcgcgcaaaaagaagagacgggttgtttctgaagataagtcttctggtgctacgcacactgcatcaaagcaacctgatgatgtcagtaaaccacatcctcgccgaccaaatgacgactctactcgatctgctgaacctcaaccacacaaatccatcgacacctccaagaaacctccaactcgcccaacttcaccccgtcatgatcccgttaaaaagaatggtgatacgagaaaggaatcgcatgagcccaaagccgacaccatggaagacacaatggccgtcgctaaacgtctcgagcttgaagcccatgaacgtcgaagagcccaggctaagaaggtgcaagacgagcgcgccgcgaacgaaaagcgcattgcagatgaagccgagcgcgatcgacttgccaaagaagaagctgaacgagtagctcaggttgaaaaagccgaagaggaagaccgcaaacgcaaggagcttgaacaacgacgcgccaaacaagctgaagatgatcgtctgaagcggttggagcaagaacgtgctcgagctgccaagatgcggcgcgatcgcgaggcagcagagcaccgacgtcgtgaggcacttccaagtcgccttcgtgttgcagcgaacctcgtgggctcaaacaacccccgcgcgaaaagccatgactggctcaagtcttttatgcctctcgttaccgctctcacccgtcaactcgaccccagctgtgatgtggatgtcgccgacgagaaatggatcccaaactatttggttgcacctcttctggctaccaatgatctccaactttcgcagtatcccagctgggagaagcgaaaggcgacaccgactcaacgtgtgaatttgtggcgagtcacccgtcgcatgttgacccatacggatgatgttggattccaaagctcgagcatcggacagatcatgcagaaggattgtgatacacgccccaagtatttcgagatggagcatgtcttctggatccgagtaagttttcttgtaccttgcaagttatgcttcaaactaacaagtattttagctttccgatttcacagacctcgtcccacacattcctcacctgcacggcctagagctgcaattcttgaacatgcacgtcgatccggagccgccgacggctggtgcagatttcggcactccccaaattaatggccatggcccgggatcctcggtcgaaaccaatggaaccgggctcaatggttatggcccttctcggtctagtacatacgtctagttttgttttcagcgtcttttcgccaggacccggcgcaatgtcagcaattcagcgaagcggtgtacagttcggattctgattgtacgattatgatacctcttgcgttcagtgatgattcgactatcattaggtagttttgttgggtttcttatgtagtcacactgtaatcatgcatccccgtgtcaaataacactgttcaaactcatatcttcaagttcgtatagatatttatagtaacttatcaaaccatatataagctagaaagctaaagatgataagtgaaaagtgccatcaaaccgaacttgtcgtacattgtatggacaaatatatcacgtgactgcgtttgcggggacagcatgacataatcgtagggcacacacagccgaaaaagtcgaaatagcgggaaatttcactgcgcccgctccacctcttaatttctctctccaacaactctactcttcgaggatcatccgatttcaagcataacaagcaacaaaatggtatgttttatacctgcgaattaccctcacaccacatccgtacccaccctgcatcctgtcacgacaattgagacgctggaatggacatggccggcgagagcaattgcgtcgccgcagtagaggtcaccctcgtcggatgtttaatctatacgctgcaccggtccaaactaatcccaagtctcaagagtcacgacaaagatctacacaatggaacctttgaagcaccatatactaataagaatccttagtcggacggagaagagcccacatcccccattgcccccgccgaggaggtcgaggtttctgccgatgccggtagcggccagatgtccgtcttggacgccctcaagggtgttctgcgcgtctccctgatccacgatggtcttgcccgtggtctccgtgaggccgccaaggccctcgaccgccgtgaggcccacatgtgtgtcctgaacgagggctgcgaggaggaggcttacaagaagcttgttgtcgctctctgctccgagcacaagattcccctcatcaaggttcctgacggaaagatgcttggcgagtgggttggtctctgtatgttctccctctattgatgtaggctattcatctcggggtatgtttgctaacattttgttcttcaggcactctcgaccgtgagggtaacgcccgcaaggttgtcaactgctcttgcgtcgttgtcaaggattggggtgaggagtcccaggagcgctccgttctcctcaactacttccagaccgagcaatagattatttctattgagtggctgtgagtagcaggtctcgtttcaggcgctgggttgactgggggcatttgtggtggagatcaaaggaggaatacatgagaggtagatcaatgtcgaaactactggctggactcggagtatcctctctgggtttggtatttatgatggtggagatctgtgatatctctgtttggtcttttgaacctgtcatttcgaatcacctagtctatagccgtgccccgtttactcgggttcgcggcaccaatggcatctggacatcttgtctcctttgacacaaataggattcgaaagtatctatgtgctttcttgtagaaggttgttaatataagtaatatcaacattgtcagcaaggaacacaaaggcaatccggaaactctgcatatgaaggctattgtccaccaaaaacgacgaaagtccccaatcaatgaatgaagactaacactcaatcgacatatataggacgttcctacgagaccttctcctagatgaaatgcgcctcttgcatatgtaaccttgtcagtgacaggaggcggtttttgcgtaagtctccattttcataaatgaacaacacaccagtgacaccacatgccccaagtgctgttagctcacaattcaagcgtaagcacctagcacagcgaggaatcaagtgctgcactttcacagaggccttttcaagagacctatataataatatgagacaagaagggcaactagctatgtaactacaatatgaacttatgtacgaagtatgtactccgtatggtatccacctttcgacaagaacaaatgagaaccagcaaaaattgatgtctgtcttccttggctctataagtcagacattttgtcggtctcctaagggccattcgagactatatcaagcttaggagctgtacttcttagggctgcccgcaggagagtggatcatctgagtcagccggatttcgtgacttccctaactccgactgggtttctttgtttccttggacagacgctcttttgaggaaaaaattccctttctttttcttctttgcatagattctaatcttgatgagaggtgcatattgccattatttgccatcgttttactctgtattaggctccacatcctattgagacaagcattgtccaatatcctaatcccgatataactccaatcccgaatcccaccgggcatcgggatgcaatctgctcaaatccagggtgggacccctgcgccatatggccgcgcatgtatgaattgttcccgcgccaagtgcaaatgtattctttccgcaactggtagtggctgcgaaaggtgagtggcactgctagagagtgtggcaatagcctgaactaagcacaccggtagatgccagcgcctgaacaaagaatgccggcctgcgcagacagtccgcaaacgcaataagccggcgtcgggttctaatactgcccatcttgaagccaaactggattggattatgtccgcgtttgaaaagagtggtgttacccccagtcttcctccagattggcaacctgtagacctagggcagagtcaacggcatgagccaagccaatctgcaccaatcactcaaacctcaactagagcttcttcttcgactgccgaggaaggaaattaccctgaacactttcttccctcgtatgatccggagatattgtctctgatctacgttccgcccgccatggctcagaagtacctcgaccaattccgcactcggaatttgcaatatctcccctttgtccacatcccttctaatataacctctgaccaattgcaacagaagtatccattcctttgggtatgcattatggaagtgagcacgtttacaaatgcagaaaaaggtgactctttcgggagaattaccaaccatattcatcagagagttatgctcgacattgcgccgagcatagatcttctccttgggatcatgactttcgtatcatggtgagtagagaagaagtaccctcatgaaaaccactttcctcattacaattctctttgcagggtcacatacactaaaaggccatttctcaatgtctatgcacacatgctaatggcggtcgtcgtcgaacttgggatcaatcaaagtgtcccaaatgagtattcagccatgcattctttcaaggtcgctatcggaatgaagcaaactccacccacagccagaacactggaagagaggagggctgtgctgggatgctttttgatttcatcaaggtaattagcaaatacccagagatccctaagcaataattaacagctatactaccagcacggcattggcaatgtccaggattgacgctatgcgctggacaccgcacatggaagaaagtctttcaatactcaccgatgctaaagagtgtccccaggatgagctcctgatcgcactggttaagatctatttggtcttagacagagtccatcaactgcgacgggatggtgaggtttctatcccgctagctttctatctggatagcttcaaaaatcaattggatacagtgaaaagccaaattccgcctcaccttcaacagcacagtatgtttatacctcccctgagtcttcacagctatgattaacaagacaaaaggagttgtactgatgtatctctacaatgccgaaattgtaatcaacgaattatcaataggagaccccgccattgcacattcgcctgatctccatcgacttgacagcctttacacctccctccgagcaacaaaaggctggttagatgtatggctagagcttgaaggagaggagtacctacagctatcatgtgtcatttttttccaattcacacgagccattgtcaacctgtacaagctcaccattctggaagacccgcaatggtctaagagtatggtccgagacactgcaaatatcctcgaatacctgaacaaaaacgaagccgtcatcagaaaatgcccagaatacatcactttcgaccaaagcagggaaatgaacctcctcgaaaagggattgagaatggttcaaggcatgcgaataaattgggagccgaaattattggaactatggcgcccaaacatgcccgcgaataccgagatcgatagtggtatgatccagtccgatactatactccctgatgttatgcctttgggtgagattgatgaggcttggatgatggacttccttgggtcgttataatcttggtctatgaagcttgaaacgttagctaggaagtaatatgagggttaacggctttatacataatataatataccccagttcagtcatatttgttgccatgtaagtgggggactgaaaaggaagatttcatcatcgcgataaggtacagcttcaacacatttgaaatcatcggggacttggcctttggcgagccctgtgactgcttacgggaaagtcaataccctatggtcaatacggtctttgtgaacatgatagattgtcaggaggcgcgtcccaaaaaggcttacaaaaatgtgagaagactcattcgtcttggcaacaaacaaagctcatcgcttattagagactaaggttgaacggccggatttcgatttatatcttgcgatacaatgatgacaggtccatgaccacgcaggagatagaagcaaacctagctttgctgatactcgctaggagtgagacgactttccaaattcacttaatatagcacggcaaatctcctggctgttattccgcgtgttgtactaagggagattgcatttagggtagtttggtttagagaatgcatttatctgttttcgacactattctacttagcctcgaggcggaaagtcggacagtcagacagtagttcaaccattttcacttgggcccagtaactgtcttagagtaaaatgaattttggcttatggtatcttcagggaccgggccaactgtattcatccacaactttgcctttgtggagatgcgtctaactgcgaccagggtcttctggagcttcgactttgacacgaccatggacgagagctcaactgcttgaagtattagaaatcctggaatttctgggaacccaggccgttgatggtgaatcacagcattaaaagtgtttcaattagccgtctttagttgcctttagtataactaagtgttgtgaattgctatacaaggtacccaggtagccattcatattatagaatcgctcgccacattcgtgatacgagaggagggaccattaactagcacgtcactatctgccaataaacaaaattcttgatattatatgcgcgtgcccttttggcttttgggtaaccgagaatgtacatatttatatcttactgagaaatttactgcgcatacatgtataagattgtcctacaatagttagtccttcttatacatatgtgtacaactttgaaactgagacaccaatcaacgctggaactaatgagattaagatcataggctagggctgcacatttgaagacaagactcggatttgatctttcttgaagatctagccctaagacctgtctctgaagttacacagcatgaagtttaagtgagttgaccgttgggtgtatcaatctttcccggtgaggccggctttgtggcgaattgagatgaatatctagatcggacatgcaaacttgacaagggcctagcttatgtatcgcaatctaaaagcaagaaaaacatcaaagataaggtacagcttaaagtagcacactcggatagcaaagtcgagtataaaggttgcttcttacacagcagtcgatctactactcaccattgactattttaaaacatcgcaatcaatcaaaagaatgtctagctttgtctatatttttgcactcgtgcctttggcactggcttccagtatgatcaggatggtccctaatcaggtacggctatatggagtgtgtacaccggatcaacttgtttactctttatctaggctatgattcttaaagaacacgacttcgcaataaatgctggccgaaaaggagtgctcattgcgtctgatggaaattgcatggatcttgacaacatttccgactagtaagttgaatattattcccaaaaacatgaagttttgttgacgaaagtatcagccgcataaattttggatcaatctacgtcccatgtccgtccgaggtcaaggaagacatgatctgctcaatgtactcctaagtaaatagcctctgactacaggtttatggtgttaaattatctagcgataactcttgcaacaacgagctgttcacatttactcgaccccatgcaaatttgttcagaccagctgttggcgatagtgttggtagacatgtcagaagcattaaatgcacgacagttcattctcctgccgacagacaggaacatgtattctcaagtgatcatgcatctgccaagagtccaagcaactgccccaatgacagctgttccagtgaactggactgtcaatcaaaccacccggattatggtatgtactgctcttcgagctctctgacctgccagtgaacctctgagactggcagacattgcgaaggagacagtcgatgttctgggggacaattgttcgagtggagagtgtatgactgttgcagaaaactcgcgttttctgcagggctctgggtgaccttctggcctgcagtgtcgtccgactcattttcattggtctggagcttctaatgtggagatggtctgcatgaaagatgaggatgctcgcggaatacagtgctctgctgaaaggccttgccaagagcatatatcgtgtgttcttcagcatgagactaacacgtactgtgagtggaatggtacttgtgggctgaatactatgagctgtgagtcgggcagtcaatgctgctctggattttgcaaggccaacttatgccagtgatagtctttgcggaagatgtcaagcttggaggaaatggtatttgaattgagataaaggctgaatcttagctcggcttatgcaacaaatttgtttgaaagttactcctttcggggacacagccgctgaattctttccaatgcatcctctcgaatttcgcggacaatatcttctgcaggtttcacaccatgtatcagtcccacagaggctcctgcatatgtcgcaagtctcccctcaggcccccagccgttatcgcccgtcttagcagcctcatcatgaagtcttctcagttcctcaaagggcttcccttcctgccgctcaacaaatgatttgttcacgatagtccggggactatattgctccggccacccgaaagtgcctcggaggtgattatatagtagcgtacgcgtggttgaggccgcaccatcgaccgcacgtacaacctcgtcctggtagccctggctaatgcgtgcttcactagcagccaggaatcgagtccccatcaccacgcccgaagctccaaggcacaaagccgctgcaacaccgcgcccatctgcgattccgccagctgcaaacaaaggaatttggctgcctgacatggcatctgccacttcgggaaacagtgccataagccccattccgtctttcgcccgaccatggccaccagattcagctccttgcaggacaatgacatctggtcgctcactgttcagaagaagctccttcgcctccttcagagtgccaatttgaatccagatttgggtgtcaggggatacttggcggatcttgcgagaccagtcgtcgtattccttgggtccctggcgtggagcgtatagccaggctgcacatggtttatacttttcgatagcggcgacggcaacattgatgtcgtcagcccagagctggtatcctatgccgacaggcagtgtcgagccgggagttggttttatgccggcctcttggtgtatgagcgatgatgctttctcgagatcatcacttgtatcctgtgttttggcaccggggccaatgaaccctagcccaccagcgcgagagacggctactgccaatgctggaccggacattactttcataggtgcgctgaccacgaatggagtagatacccatgggtatcgcgatagcaagcttgccgccatagtttgatgcttgggatagttggtagatattgctatttggataatatggcagtgagagcggtagttgtgtggtgccttgcgttttgtagttgccgaggaatcgttgacgtcaccatagaaaccccacaatgtccgcatacaaaacaaacaccaaatgtggctggaggaagttgcaaggcctcgggcatcacatgccattcccgcaatatccgcaatatccactgcccactcattccatccgtgataccctacttatcccattccactcggaaattgcgggatctctatcctgcttattgttcgaagatatgccacactccgacctcaagcgaatgcgcactagagttgcctgttacccatgccgggagcgtaaaagaaaatgcgatggcgctgaaccttgtgaaacttgcagtcaatggggctatgattgccactacaaacgtcagtcacgacagaggaaccatcctccccaacaaccacagagagaaattggtccagatccaaggcctccacagcaaaccgactcggttgatacacacgggctggatcgtcggttgtgggcaaactccggtgctgcgtttgttcggaggatgggtctgaatatcgatcctgcgaaagcgccaaaacttagccttttcggttggaatattggaaagcgacaactgtcgtctgaatctcaagctgtatatcctgtgctgtcaattacggatatcacatcattggaacacatgaggaccctcgctcaggtctacttcaccaagattgctccatactatggctttattgattcttctcaattttttgagcgactggaggctaggtggcagtctcccatgattagtagtctatatgacagtgttctaggtggggtcgctgcactaggttgtttgcattcccaacgaaacatgaccatcaccgagttgcatctcatcgcatccgcacaatctattctcgactctcacgttctgtgtggggctccccccgtagaccttctcgttgggtggacattgcgagtcgtctatatgcgaatgacagatctgcctcactcaacatggatggcgagctcgaagttgatgcatttggtggaagctgcaggattccatctagagtctactgattcagtctttccgcgtagtattgacacggagtttgatccagacatccaaaggcgactcttcggcgtggcactacacctgaatatgtggacttcttatgatcttggtttatcaagagtgtcctttcgaaagaatgatctgccattactcccatcaactatcgagggtgactacacgcatgagctgctggggcttattccattatcggcaagcctagatccaggaaagccaaaagaagatgatatcaagctagaagaaacgcttgtgcagatactagaaagagtccataatgagcctccctcggccatggcgcaatgcaatcttgtgctttgcattctgcgcagaattcacacagagaaacttgagatctctcctctcctcgcagaaaaagccttagcggtgctggaaaagggactttcttgctcacgcactatggtcgcgaactgcactccctggcaacatatggcaaatgtacctttccacatcatatgtctcttgcttgtgatggacacacgccaatcgctagcgctactccccgaagcaatgcagacactgaagttcgtcgcctccacttacgatacaaacaccttgagagaagcctggagtgcggctctcttgctggttatgcttcatcaacaacggaggaaagatgatattgcgatcttcaatgacatcatgaacatggaggaacaagaacgtccagctggactatccccgcaagaatttccaagcgcggaagagtactcatggctaggggctttggttgctgatctacccggtttgcaaagggatgaccttgatcaatttctgaattcggatatgattgatagttcaagtttcttgggtggagctagatgaaccctacctagaggcacttaagtttttgagacatatctaattctgtgtgaacattgtcttgcctcattttagaccttgtaatttagttttgctttgaagttccacatggtacaaagccttgcggaaattgcgggcgccttgctgtgcctggctggtaaaattctctgttccgcaatacccgcttctatacattgggagatcaaaaagctgtttgaacaaaaacatgcacacccattatttattagtgttcataacccaatattccaccacagtacaggaagctcggcctgaattcagcatacctggacatccaaccatcaagctcatcgacagaacgtgtctgcacgtcgctactctatcaagtccaaaatgcatgagaagacactgataggagccaataacgcacttccgccagctctttccaacacagtaagctatgttgattttgaagggaccgatgaccccgagcatcctcagaattggagattgtctacaaagtaagccacaagtccaaatcagccaaagatctggatattctgaatgcaaactaaccacattcaggatttttaactctacactagtctgctcaggcaccttcatcgtctcactaacaagcgccatcttcgcaccgggaatcgacaaagcaagcaaagcgttcggggtcgggacagaggtcggaacactgggaacaaccctctacgtccttggctttgccacaggacccctcatatgggcacctgcatcagagctacggggaaggaaatggcctctgacaatttcaatgttaggcggtggaatcttcactattgcatcagcagtggccaaaaacatccagaccctgatcatatgccgtttcttcgctggcatgtttggcgcaagccaattgactgttgttcccgctgtattagccgatctatacagtaacgctactcgtggtgctgcaatttcgctgtacgccctgaccgttttcgtggggccgtttacggctccttttgtgggtggcttcattgcgtcgagttatcttggctggcggtggactctttatatcccggcaattttcagcctgtcaattgcgctattgagttatttctttttggctgagacatatccggcttctattctcgtgacgaaggctactgctatccgcaaagagtcccgaaatcgcaatattcgtgccagacatgaggatgtcgaggtcagcatcgcagatctcgtggagaaatacttcacacttcctttgaagctgctcttcacagagcctattattctcgtcgtgtcaacttacatgtctttcatctacggcattgtctatgcgcttcttgaggcatatccctacgtcttcgagcatgttcacggaatgactcctgcttttgctggtctaatgtttattggcctcatcattggcgtggtacttgcatgttcctttattcttttcggacagttggcctatgcaaggagactggcagagaataaaggcatcccagtgcccgagtggcgcctcgctccaccactcttaggagcgcctgtctttacaataggtctcttctggtgagtagaatgattttctattagaatgatgtatgatgtcagctaactgtccatcaggtttggctggacggggttcacccctcagattcactgggttgtacctgccgcagccgggatattcatcggcttcggtgtgctgtgcatatttcttccatgcttcaactatctcgtcgatgcatatttgccaatgtaagttcttggcccctctacttgaagtagtcaagacactctgctaacctgaattgtagcgctgcttcagctgtcgctgccaacatcattcttcggtcagcagtagctgcgggctttccgttattcgcgaggcagatgtttcaaaatatgggaattcaatgggctagcacgctacttggatgtttagccgcaatcatgattcccattccgatcatattcagggtttatggaccatggctgcgaggaaaaagcaaaatatttgcataaaagtgccataacctggattttgaatgaggtgactttgtgggttctttccgtatggacaggtcacagtgagccacagctgctgccaggccgaaaagcatatatagtgtgttgataagagttgaaatgcttcatttacatattctcaaggtccaaaaaggttcgcactcatcttaaaagctcgatcgagctttagctctaagtgatcgtcccaaagtaaacaagcgctaatggagccgataccaacccaatgatggcgatcacgctgttgcccgatccataaccaagaacttcgtacatattgggcgtagatagcttcattctaattcagtattttaatttctgtcagttaaaataaggcatagttattacggcatattaaggcatcagctctacaaaatcaggcattcggccactgaccgctatacaccttcgcacgccactaagctgctttaggcttcagcagttctgatgacgtggattgcgtcgtagcagcttcggagaaaagaaattcatgtggatatctttcattattatgtaaattgagagcaggagggacgaaaaatgtgataacattggaaaataatacaaacgaactgctcccctgagctctgttcacatggagactacaattatgatattgaacaaactcaattagtttacttcaagagtcgcaatcctgtataggggctctctccgctcattcgaggttattgtcgatcgaactgtccacggcccatccattgagcatagtgtagtcggagtatggcgaggtgccgtgcagggtttcatagtgcttgcgaggcccacactctctcaacttggcagagtctgcgttgacgcaccgcttctgcatgatagccgcgatctgtcgacccgcatcctgtccttcatagtatgcaccgtgaaggaagccaaagaaggtcgggctggtagcctcaccggcaaaccagagccggccagcgttggcacgaaggttctgatgcatctccaaagatgtggaaggaggccagttggagtaactgccgtaagcccagggctctgaggtccagcgtgggtacatgaatgcagttggctcgggaatatccttctccgggaacatcttgcgcagaactgccattgcttcctgcttggtctgctcgtctgtttggcgctcggcccgataggcaaactcgttggtcacggtcacgaaaatgatgttagaatccgggaggaatccgggagtagatagtgactgccagatcgggtaccagccacgggtcacaggatcagcatagaggtggtattgtgtttccgagggccagaaggtctcgttgaactggaagaagatcttggtgtatgttcccatggtgaacttctgaatagcttcctgcttccaatcggggagttctggggagaagttcactgcgccattttgcagaactcccagcgagaatgtggtaatagcatagtctgcctcaacgcagctgccatctttgttgtgaacagtgacaccatcgtccgaatacgtgatgttcgtgacctcggtgttcaaatgaaggcgggtatcattgcgagtgaggaaagtcgaggcgagcttcttaacaatgatattgaatccgcgctggtccaaaacaaactcatcgtggtcgctgaaatagttgaaggtcaaattgttgcccgcacagccgaagacaaatgagctctctattggggagtaagcagcctcaaagtctagtcaaagatgttaatatcgcgctagttgcatctgcaagagagataacttaccccacgaccaccagtcagcagcctgtgcctccatatcatgtaccttggggttccaaccagccaaggccatgccagacttgacgttttgatcctggagattctgagtaagaatctcacctgccctctggttggcaatatcataggcgtcgtcataggcatcgaggagatcgctatagtcagaataaccatccttgttgtaggtagagacattgtcataatttgcccattcggtggtcaatccgtattttttagcctgtccgaggtcagttcgtgtccgatcgaaggtatgttcaagacttaccaagccccagatcgggttctgtggacctccttccctgccaataccttgtacctgtttgacctgtcagcggtgtcctttcctgtagctgaaacatgcatacccaattggcacccatctcaatagtataaggcttcccatctttgtcttcaccgaacgacttgtgccaagcccgaccgccgatagtatcgcgatactcgagaatcacgaaatcgtgcacggaagcattcgttagggcttgctatgaaattgtcagtgatagtccaagataaagcaaaggggaaacctacagcagcagtaataccagccacaccacctcccctatacttggtgagcttttgacatcgatcaataagaagtccagcacttacaagattgcaaccttagtcttcttgcacgttccctcagctcgagtgcgatgaggcgcaccgatagcaggctggatagcgcctgctatcgcgaccaaaaacgaaaggtgctgtaaatgcatggcgaagctctggagatcgcaaaacagccccggggatcgattgcaataaataatgcagaaatcgaccccacacagggctgtacctgcacatccagagaaagataagaagccgactccacgcagccacgcgacccgggaactccgacttcctcacaccttccgcaatcgggcaagtacatgcgggaagctaagagaagcctaatttaaagcgatataggtatctgcggggaggccttcaatatcctccgttttgtgatttaatcatctctaatctcattcctattacgtttggaatgctgaaattagcctggtccgtccatgtggatattcctaagtatcagatatactcgcgttcaacccggaatcttcgagataccctaatcgataacaaccaggggctactcgagccccgattgtcatccaatgtgctcatgatatcgaatatcgtcggagtacgatatcagttccgctaaaatggtgcacaggcaaggaaccatattcgacaattagtcccggcactgtagcctcggcagtcatacgtacctggaatggctcgaaagccgtgtagctctgtgaacatgcaattgaattgtttcaggcaatgtccccggatgatcgtcgtaaatgactctttgaaaaggctgcaggaaagactattgcttccactaaggacttcatgctcacctcggcgatttgagataatctagcaagctccggaaggtcgttggcagatagagttcgtactattgttgctgaggttgtttcaccgatgatcaatccgagctgttggccaacagaataggcagtaattgttgtctaccttcccacctcgactccgtgccgacaaagctacaaattatgtggtaaataggcccgccattccggttcctgcaaggaacactgggatcagactaagatagttagagctggagcaccagaaaaggagcactgcgaaagagataaccgttattcccaatccaataatagacggttttttatatttcatagttctgattcgatagttagacttagcattcaacttaccgacgaatgaaccgaccatgaataattgagccgagagcgatacctaggggaattgtgaaattacgaggcgggataagcccaacgttggccctgcacaatcaaacataagaaagggaaggttcgaggtgagctatttggttagcggagtagcaacaccatcaaattcccaatcgaaacccgtaggccgcggaggactgcgaattgtaaaagctcctgacaagcgccgtaacgtaacgactgggaagaaaacaataaggaggaacagtcctatgaatgacatgtttgcccattagttcggagatacacaattctcagggatggatggtcccatcgcagccaacactttgattggatcgccgaagcttacccaacgtagaggtaactgaaaggtagcttcgtaataccacaactttgaacggacaaacaagatctccttgtaacccacttcttgtatgcaatggacacggaaaggccgtgtatgatggggaggggggttatctaaagtcacagttagaacaatgaggtgtcatcgcaatagtttccaatgttggctttgagaagtcgaccgctcaagtggcaatcgtggcatcaatgggcatctgtcaggcgcgggtgatctacaagttatctctaaccagcatggcatttgtggtcgagagatttattcgtcatccagtgaatgatcttgtcaaggcagctgagacaaataggaaagccccagtcatttttctcatggtagtgtcaattcgattcacagaggccgagagatgattagtcgagtttgccgatgtctttgattggacatggccgaacacttctgcgcgagttctgagatacttcaattgctgtctcgatgagatcaggttagtttctgatatgtcaaatacataatgagcatgtggtgatgatctgcaaggcccttgagataagtggaatttcctcatttccggagtcccagggcaaccaaaaagaaaacatctttgtccatagatacaaaacacataggacacgtagtcaagacatcaggaaacaaggcagaaggattgcagcagttgatgaccacagatctattccacaagaaatagaaataaaccgaacaagaaaaacaccgccgagctatgcaaacaccgtgtcagatgccatctgacgttttcccgaacgccaaaccagagacaccgaaggttcagatagagagcaccagaagattattctgggctaaagcaaagacaagaagaaaatgatatgcagagaaaatttgctttcagcggaaggcgtaagaagggcgaaccattttcgatacttctggatttagagagagctgctggtaaggcgagcttcctgggtcatagtacaggccttcgatgtgtccgtcctcacggcgaagagaaatgtagtagaatccggaaatagtaagaccttgacgagcatctgttggggtgatgaagcatcgctctacggcatgttagcaaaaaataaaaacatacatgatctttcgctacttacccttccatctcatcaagatccatccttgagacaattcctcggtaatccatttccgattcacaagattccgggccatctcagcatctgtcagatccttaaacggctgcagttcacgccagtatgtgctatcaatgtctgcatctgccttgaagttctttgtcgccagcgtgtgattgttgaaatcgatgatctcgccctccaagaaagtcacaatgtgtgcgtcgtgggtgggcgaggtcttatcgggaatgttgtaggcctccatagtgccggataatgtcatgtcctcgtggttgatctggtgtatcgtgaccttgacaggccaattttcatcacgattgttagctaagtatcggcggccacttgtagtagaaacgctgattcgtgcactctcacttccatttacaatgacaggctcactgggggcgttcggactagcaatacgctgcgacaatattgaacacccggcacttgcagctctttggcagcctgaaaaggccattccagatcgaagccatgaacactccgcgggtggtgcgatgttgcgagtgtacataatgaagttcgcgtttctccaagatttgctatccatcgagaagggtatccgactgtccaccaagacacgcatactatcttcgagagagtttgaatgccgaatgcgctcgagatagtggatggtctcccctaacacgttgcgcatacttgtgtccgagtgtagctggcgatgagcggcagcccgagcgcgtaggtcgttgtgggtgaggttggtattgtgtgggtcaccgcgcgtcgtaggacggtagcggtatccccgagatgcgaccgctgctgtattttcagcgtcctcctctggagtgatatctgaatagcgatcgatgatgtagttctccagtgtgcgactcctcgaaagccggggctgacgccttgcagattgtaacaaagccgccactgcagagatcgatgtccgagcctggttactacgcggtaacgtcgcagaatcatgcggcatcagttgcgcagggcccagggcctcattgcgcggaggtcgtgcggggggtgggtcacgacttgagatagcactgaggaaaggctgcatctgatcgtcttccgactcttcgcgcgcagcaccatcctcgtcatcagagccgggtgcccatccatacaacgaccgtgagttgggcattcggccctcgtagttcggcatgtcggttgatctctcctggtggcggacaatagggatgcgacggttgagttcaacagacgcgcgcaggttcgtgggatcatccacctccatgcggtcttcgttttgtggtggcggattagtcggataacgacggcgacgttgtcggctcagggagggtaatagcggattgaagagagctggtcgcgatcgcaggaagttcacgttgtcatcgtgagcattatcggtctccacaggggcaggtgtgggaatcgacgatcggcgcggagggtcaggtgccgcggtcgtcggggagagtggcgtgccgtactaaaagatattagttcacaaattatactggggtgggttgcaaggataaaacatactgggttaggaggcggcattctgatcagaatgcgccgtcaaggggtgtgcaggatcgacgttggccatgcaaggccaagagaccaatatatgtgtagcaacaaacaattaagtccggggaaagatgtccacgaatcgcctgagaaagtgtcggatgttgtgcttctaggactttggggatgtggagaggcccgcaacgtatgacgttcttcctttcaaccggctcagggcctctggaagaatccgtggacttcattgaacttcatagggattccaagttgatttttacgtattcttattgaattttatatagctgagagtcaaatcccctgaaagccaagaacgtggagccccctgttctgcaaaacaaacataccaaaatggtgtgatctatataggtcattcaaacccctttaaatgaagaacaagcttacatcgagcttgccatatcctagcgattaaacctgaatggctctccatgttggcaacccgattcttcatttaaagggaaattgcgtttagggggcattggttacctcctattagattgcctgtcgggttgtctacgggccaaataaaggctttgataaacaatgcatatggtcatgagtcagtatctaggtactaagaacaaagaatgaaatttctcggagtacagcttgtgactatttggaaggcaaatcctgatctacagtctccatcaagatattgtcctaaacagtggagctctatgtgcaattgaggatctaaatcacagtctaaatattaaccagaaccctgaaaggatttacagaccatctaaaatgttgcaaatcaggccacgcgtgcagcattgcaatcatcggccagctggacacattgtaggaccatgttccagaaagcatctagatcaacacccctgggaatagcaacacccggaccatcaacaggagtagcgatcgagcgccccagttgacctgtaatagatacatctttcccgtgctttccatcggtgacaatactcaaagcaaaacgctcgccgcctttgtcatcaaaagcgagagtttgattggggtgcacgttggcaaaggctgggttcagcgtcgacaggatcgcggccacagcaaggggatcatgcaatggaggcccggtggtcaaaccaaaggttttctcgtatgtggcagcaaagaaagtgagtagcgcgtgcaatatctgccgaaggatagtaggatcctcggccgagtggatcgagccatacaagatgcgcgtttgaacagcctgtgtggccaagacctgatgtgtgagatctaaagccataatagctgtcttagaagcaagaactgggttgctaaagattgactcagcagactctgggtcacactataataccatcgtgattagacgagccagagaaggatgaaaggttttgcgaacgtacatagaagttgaactcagcccatggggtcacatttccgatcctagccttctcaccaggtagtctactcatgggggcatcggtgaatcctccaccaatggcaccacccataatgctcagcccttggatgtgttcagctacctcggggaatgtggcaaacaacagtgcggcgttggtcaatgtacccgttgcaaccagccaaggagttcctttgggttgtgcaagaagagcatctctcatggccacaatggcgttcttatcggtgatgggtgctctagtggccttgggaagaaggtcagtcccatcaagaccggactcgcctggaaagtgttattaaaacattctgctcctgatatcagcatcaacttaccgtgaatatcaggtgcatgaagagcaggccgtgaaaatggcttattgctaccaggatagacgggaatgtcaggctttccgatcgcttccaagacgctgccggcattggcggttgtcttctctaatgatgcatttccatggacagtactgattccaagaagcttcaaatatgggtgatgagcggcgatcaaaattgcaaaagcatcctgtatcgtattaacaaatgtctctctagaatttctttgatgcttacatcgtggcctaagaacagtcagtaataagaaggcggaaggaacatgatagactgaccaggatcgcaatctaaccacaagggagtaggactatattgattaacttggtctaacatggtggataccttagagcaacaaatggaattgaaaatcaagaggccacttgggctcttaagtacatttggccggacataaacagatccccgcatcaaaggagggagataaggcttatcttgaagccctaagccctatggtcccaattgggtcgatacagattatcaacgcttctaatgtcgaccttactgcttttaacagagaacgcttttttccttgatatgtgttgaaccaactctaaacatctgtgcgatgaaatgaatgatccgctccgccccggccttcagccgatatctcatcttaaggctgggccgacaacctccagctccagatccaccgcgctgccttccccaacgacgcttcagcctccttcgcgtccttcatctcgactccgtacacaaagagatactggcaaggatgatctggactccgttagtgacaaggccaccaccgctctaatccgacgcgttctatgcccccagacaagcagccacggagcatcttccccacagcctccggaagagctgttacctcccctcacgagctccaatgacgttgatcgtcaactctacgcccttctcgccatcataataaaagaatttgtttactcgtggtactcgaagatcacccccgatcaggctcttgtgaatgaggttctacaagtaatcgcgcattgcacgcgtgcactcgagcagaggctgcgccaaatcgacgttgcacaattagccctggatgaaatccctagcctggtggaagcacatgtaatctgtgagacttgaccgttctaaagtccctcttgtcggaatccatagttgttccgagaaacattgctgactatgatcttccagcatacagactggccaggcaacagtcacatctttctggtctaccgacatcataccgtacaatctatcatgagctaaacccacaccctggtctttctccagtacctgatccaggagatccagatacaatcgtcgagcagacagacaacgaagcggtctatcgccgactactcgccaacggtatcctagcagttcttcttccaacggaagatctcgagaacagcagtctccgggcgcttgtggttgatatcatagcagacctcattctaggaaaccaagtcagtggcagggcatgtgaaggatggttcatttgggaaactatgggcaaactcgccgctcaagtgggacaccgtcaaaaccaagatgacacaaaatctgccccggacgctggaaccaatcgactagaaaaattcggcttgctttcaaccgaagatgagcagctcccggaccagccaccggcgtcgttctcggccactgcttggatatggaaccttctgcagacggtttatcttggttacgtcgtcttgcgtttcattgcgataggcttatttcgtgttgcatcgagtccaggcccttcttcgcacggtgttggtgtttcacctgccttacccatcgaccaaaaaagagatgggatggagtcgtccgatggcatcacacgtaggcggccggttctcgactaccggatgtatgccatgatttcgcagatcctgggactctcatggagaatgccatggctgagtggattgcttgccctatcccaataccttattttggcaggcccaggcagggtcggcgctacggacggaatcttagataggtaagttcttgttctattttctttttctttttttttctcagtctgctgcttctctctgcaacccctcaacgccccaacactcgagggctcaggccttgggaatcaaagactgtggagcaacggtacgatctccgaaacgcaatctacgggtcaagtgtcacttgtgcgagtcaaggtgggacatgaagcctcttgctcgcatgctgcgtcggtcacttgatctgtaaccttggaaggctgcaattacctgtgcgagggattacggtcatcttacgaccttacgagatctccttactgtacggtcattaccgtcagtcttaccaggctgttctggcataggattggttgccctcaaattggcccgagcgacttgaatttgtcaatcagggatgtctgtgggctgcccgcggatgccccgtctctgaatctcctttgagacagaaaaatcctttgtgtgtgatagcgccggggcccggccctttccgtaccgctcgtccacttttgtgttggaaatcttgacgattgcaacatctgccaactttcaaagcgcttggtttaccaaacaaagaaatgacatcgcatcctggcaagaatcgtgcaccagcaaaaaagagaaagaaaatgcaaaaaggaaaatggggccgatcacccatcggtgaaagtgaactaaggcctcttttggcgcaaaaagaaaaaaagaaacagccccagtcgaggctagtgaattactggattcggcccaatgagcgaaattcctgtcgggaaggattggaatttgtaagctgaccgaggttggagcataagcccgcttgtgctccaggtacggagaacgctgccgggatgttacccgctgaagaggtctttttctctttgacgtgcgagaaaatgatatcccagtccttgtcctggcccaagctccttcatctctgcctaggccgatcatgctccgcctcacccccactccatacggccaatcctgatttgatggcaacttcgacttttccttaactaaacatgcgcgagaaggggaaaaagccacaacgtcccggggagctccacagtcgagattctttcttcacttttttttcaattaatttattatcttttttgggaatttgctcaattgctccgacgtcatgacttgagagagacctttgctaactgctacagattcctccgggagactatcgaggagtacgtgctgacccccactttgttgcccaaccttcttattgtaacaaggaccgccttgttcccggccaatacccgtccaatatctcagatagcggctgggaatattgaagctccgtcctcggctctgcagtcggtgcagacctcgacgcccattcagcaagccttcgcacccacggtctcaaatactcctattgtggaaggagtcaggggccctgatgccggtatctttaatgaaaccaataatgcgggtaacagcagcaacggcggcaataatgggaggggtacctcaacatccacctcaggccgccaatcgtcactttctgccattgcagccgatgtcccaacaccatcagagctaaatgacccggccgaaaccgtaaaaaggaacggcccatctaggacggagatcgccgctatcaagcgacgatgtgcagctagtctcctggccgttatcccgcgctccgtcgtacgaactttccttggtgttccctcgtcggcgcctccaccgcattacagtagtgatggtacctgcagcaccaacagtttgccccatctcgttacgtcgtccccaccaactcccccaagggcgccccatgaatctttccaggaggggaaggaaaatctggcgccgtcgcattcgcatttgccttcggacccctgtccacttgcatgtagtcaacttgccgctgagcggctgcgcacagacgatgatccgtctgcggggattgatcgcgaggaattacatctcctagacacaatcgagaaagactttctagacctctttgcagatgagtactgcaataaacatctagtctggagcattatcgagacagttctggccaaggtactccctgaaatggctgagcgcagtgttgaagatttactggaggatcgtgggatagcgtcagtgccgcctgcatttgtatagagtacatatagtttgcggctttgttattatcagcagaccttaattgatgagatatgccttatgactagcataacttccaaactcaaaaatagtgtgattgtagaaagatatcgggggtataatagagaaaattaatctgacatggttcatctataggcgaaccagaaaatttcatgtcctttccgcgtgagcagcccagttttttagaaaaaagaaagggaagaaaattggtatgaaaagagcgtaagaaagagattcagtacaatgtactccgtaggagatcaaggagaacagaatgctagagaaaacaaatgacagggggggatatagaaaaccaacagcaaaagaaaaaaagcaaaaaacccgaagaagaaagcaagcggtaaaactcccgagtccaagtccgaggccgatgatcccaaatccgtataccatcacaaattgccatttgtccattattccatatgcatcgtccagactgggaataccagggtatgtgtgcgcctataaaatccatcacccaaaaaagttccaaaggaaagtagaggtcgccctctggatatgtgtatgtttttgtttggttgcccaggttttatatctcgttgccatcgcggactagagaaataagaaatggatataaagaaaggttccgtacaagtgatcaaaaaaaaagaataacagagtagcaaaagcactagatgaaggaaaggaagaagagaatggggaatcacgaatcaaagtaaagcagataatgttagagggggaaggagggaatgcctcaagaagaaatgaaactagcagtgcacaaagacagtgggggaataatcataaaaaaagagacaagaaatgcaaaatccaacttgcgcaaggactcatcccaaattgtggatgctccgcttcttcgtcacatgcgggatatgaatatcctcatgttcatcaatgcgcggcaagccactcaacagaaagccagcctggctcctggcaagttcaagcctctccattagctttacgatggtcatgtactcctgtgccgccagaccagcaggctgatggtcgaagtagttgatgacgagttcaagggcgcgacgggcctcgtcctgcgtcggtgatcctggagagctgacgggcgagatggtggtagactttgaccgcggcggcatgtacttggtcgtgatctcagggttgctgcgattgcgcttgatgacgtttgtctggcggaccgggaacatggcgggcttggagtcgtccatttccagtggggattgcagggtggagaccgtaagagattgctggagttcgcgcttttggcgatgcgggtctgtggtgtcatcggctgataggagggttggatcaatggggacgggaggggaggtctggctgtgcagtcggttggtgtcgctgttggtgaacgggagacgggattggctcgttggtgttgttgggctgaccatacccgccgaagaagtgtcgagtgaggttgtgctgttggaatatccgtgttggtatccccctgtcagatcgggcagttcagccatgtcgtgtttgtttctttcttggctcgttggggacaatggggatccaaagctatcaatggaggatgtgggcgagtggctgccagggcttcgaagagcagacccgaactctgtattgagctgaattgggctgtttgaacagctacgaattccggtagatcctctgcgcatttttgcgccgaggagattgttcttctgcttgaatttttctagccaggctgcagtggagaccttttccttgccttcagtgcagccgcagatactggcgaagaaaagtgctttctctttgatcatctcatcgcttaggggatgtccttggctgtggaggttctttgcccagttggatagagctctctcaatatcggggactctgcccttagcccgtttgataggagaccgactcccatcttcagggtttagatacttttccttctggcgaaggactttggaaacagtgctgtatatgttagattgaatcaaataaaaagcgaggtcgaaatgataccttctctcgactccaaacaacgctgcacatcaaagtcaacctagttcctgaacacagacaaaagagataatgcttacctccaatatcagtctgctttgcagtcttgttttcctcatgatatatacacatttgccggcgatcatcgtcggtaagtgtcctgcgcggcgtagtccctccagtggaggtctttcgcaccggacacatggtagccgaaggtgacaccgatgtcggggtggtagaagcaggtaatccagacgcaacaaacggagagtgtgtcgtgagcatgctaggccaggaatgcgaaggcatgggtaggggcatggaggcgtagggcggcggaactgacatgccatacgagtccacagccatgagctgcgatgagccgtagtcgaacccactatattcgtgcatggggggcgagtgctgaggagaagcaaatgagcctatctccacccatggcgaatgggggaattcgctctctggctcatgatgagtctccgtttccatggcgggctcctccatggacaatggatctcaagaacaatggaggtagggctttttttggtggggttttggttttcgtgataggctcgaatcgggaggaaatcaaagaaagagagacaaacgagatctcgggaaacaatgaaacaatctaagtgtgagacaataaaagctgatgcatgttccactgcttccgtagacctatatagaattgctctgatagagagtattgtcccgagaaggtagctctatagaccacctaagtgaagtagaagggaagtgtataaagtatacaatctgcaagaaggtaaaagagcatgcgagtaaggcaatgggggttaaaaggaaaattccttggacgatcatatcgcgtggatttgacagaacgacagtgaatatcaattgcaactggcacgagaaagaccaccggaaaaagccatgataacctttccccccgagagttatccagcaacccggttggtgattggtcaatacagtgaaaagttccaaccaaaataataaaaaaatataaaaaaaatataagaatagccagaataatatctcgattttaatatttgctcaatttcaaaatcatccctgtaaatagaggaggaacggcgtctggttggttggccgtgcgatatattgcggcaggggttgcatctcgtcaggcccaatgcgtctggcgtattacggtgtaaaggtatggaaatcttcgttctcagggctaacgcggtttgttcttgttttttttgggatttgtgggatcttttttttttcttcttttcattctcccgtatgaccttccaaccaggatggcagactcgacggtaccgagtacatatgtatgttatatactggcaatataacctggcgctagctcatgttgtaaaatagagatgcaacagcgcgaaaccttgaccaatgtctgaatatctagttggtccctcactgtggctggccgttgtcggcctcgccttgacgaggctgagggtctcatctcaagaaacttgggttaaatcagggttgatcatccggagaaggacggggttcgttcaaagggtagcccagtttgtagctcgatttgctgggagccgggtagcggatcgttgaaccgctcaacctaaagcccgcttgacatccatgcacatcgtatgcgagaacggcgatcagagtggaccgggaagaggatagcggcaggcaaactattgattctgcttccgtgaaaagaatcttcattgggaatatcttcattttggccaaaaagcaaaccgttgaatcggagactcaacattcagattcctgtccctatagggtatattgcgaggcaaggttccgactgtggaggtgaccaacccggatccgggggtcttaatctccagtaaacacaaatcataaggtgaagtagaccgagagagagagcaaatccacatggaatagattgcacggattgaacagagtccatacaacgagggaaatattaccagactggggcagaattatgtgggcaggcggatcctaaccttgggagttcggaatatcgaccgcatcagacatccacgagagctgacacggctagaaatgaggaagtgagcaataggccgatcgttgggtggacgaatctgctgtctccgttgccatgctgttgatacgacggggttcatccaatacaagggccgaacagcaggttggatagtggtccaatcaccgggcgtagaaggcatctcttggctgtgaaaaagaggggaacctctcccccatttgccatgcggtttcggcgctaaaatccagccctcgtctttctccactacgacccactgcggtcccctccggcccgggaaccttcaccatttccttgcatcttgcatgttgaacattgtccaattgggaaggtaagggctagaaacagagagcagatacagactatagagagtatagagaatatagcagttggggaaggagtgtagttgactatcaaggtggtaccaaggaccgtaggacggcgggcttctacaacatataatacgctctactatagaacaggtattctcatttgagcggtctaggtagatggatactacccaaatatccagcaagaccccgcttgttcgacttaaccacgaggaagccgaatgtgaaatcagcctgctttatttgggcacttggaaggattcgttctcgaaacctgccgggatggaatgcgtctggaagacagataacgtagcaaaagcaaagcaaaaggtgactagggaggtctgacaaattaatcccaacactgaagaggacttcaattggtacggagtactctcgcttatttggtcgcagtaccaatcattatgcttgctgccgtcggattctttgctttgcaccagttaaatgagcggaaacaaaagaaatgtgtgacaaaattcagaggattttaattctaccacggattttaattagacggaaatcgcgtcgctagtaataatcgggtttttaaggaaaattcggggtagatccagctggcctgacgccattggagaggttttccgatctttttagggcaagggcattactcttcattattcccactactatgtcggagaaggagcaggaacaagtctagaccggtcaacattgaaatcctcaggccaattcgtatctttgcttcttgcaattggatctgtcattcttggctgtcattttcaagcttcgggagaaattatctgttaccctcggggtacacaaccgtagggtaacaagggtcagtgttacttgagtcaggtaccgatggatatacctgttgcaattccaatcctgcccgagatatctccggaaagtcgaattgtgcaaaataaatagaactgtgtatagaaaatcaatggtggatataggggaatatggcatggataaatactactctcgcttgaggtatgtgagtaacacacactagtagctagcaagatactttgtactccgtataccatacaaggctaaggaaaatagagtaagaatgcttcgctactctggggaagagcatggctcatgcaatgcaatgcgacggggatgtccgatggatcctccacgagatcacaacgtacgttataggctacacgggcggtcggtgccctcatagtcacctgatgaagaggttaagtatacataatccgtacaccctcgtacgccgatcgtgcatctgagaacagaccagatcgtgaacagcccctttctcgttttcactgaatcggcgatatgcggtctccacctcactagaactattttgtgtcgccgcagagattcacgagaactactcagtagcgtactagacttagtagacaccataagaaccccctgttgggtaaagtcatggacttcgtactcgtaatactgtgtattggataggaatcgatcagataaacgtccgcaattcaaccaatatgtctctcattcaccgcttgttcttagaatcatttgtaccttgcctcactttttgcttttttctgtttggttgaaatagtttggttaatttgcatttcgatcctgcgcagatctgtactccccccccccccccccccccccccacccccacagcgccnnnnnnnnnnnnnnnnnnnnnnnnnnnnnnnnnnnnnnnnnnnnnnnnnnnnnnnnnnnnnnnnnnnnnnnnnnnnnnnnnnnnnnnnnnnnnnnnnnnnnnnnnnnnnnnngcggaaaaattttccccccccccccccccctcaatgtcggaaagtagttgcaggccagcagccaagagattagaagctaagagattggaaaaacgtgctagtcagttgacagatccattttgatcttccccctatcattctcgagcaatatactcccttgagcctatcggaagccagactagcattgccgggtttatttcacatgtaatggttaaccgaaactcttgtggctttcgaatactacacgaaactttgtcatgctcgttaagctattagcattaggtcaatgcgttgtgtcgcggcccttctcttcacggaagtatagtatgcacaccataattgccttcccggctcttccgtcgaggctatcaacttcgttttttaccggggcttttaagctggcagctatcccatatagagactatgatcggcattaggcctaggcctttcggggactgactcgtcggcctcgaaagtaaaaaaattgggagacaagaagcaatgcgaacaaagaaatcaagccacaggcggagatcttataaatattagaattactagcaaggatgtttgcggcacgggaagtaatggcaaggggaacatgccaatcggaatgtcatcaaaataaattgttatgcagacatcctcggatctgtacatggtagggtctgttaggtccgggggcgataaggagtcgcatgatgccacatcaatcttctattccgtactgaagtagcacgacttggctaggaactgattggtctgacatcatcaatcctttatacggagtatgagaacgcaatttgtggctttcatcaggttggaacagtaggtgaaaacgagcagactgctttgttgtatattggcttttatttccacacaaccataaaatatttgaacttttgcgctcatgaaaaaaatggataatcataacaatatggactggtcgcttcaaagggccagaattcccaaaggtgccaagaatatcagaaagacccaatggccgttcgcctcgtgcgtgcccctgggctggtgtaacccctgaagcctaactcgagctcatcaaatcaagtcaagctatacctcaagacgcaagaccaaaatcagcaaggctatgcatgactgccgattttgatgtccaaaggtagactcaagactttcccctaattatcttgccgtgaacgagtctatccaaccacgctcggatccggtggcgtacggatgtctcagaaacctgtcagatcgcggaggcgtaaagacatgctggcacagaccaccccagcgcttggatcatctcgccgcttcgggctatgagtgtcaaggagttggcataaatcctttacctcttgacgatcgacactgtagctggtcagctttgaaattcatgttgagttttgttcttttttttggtatatttaccgatatcttcatcaccaagctcgtgggaaagacccactcgctgcggctgatgcttcactgagcggccatacacgatagcatgcttgaaatcgtccttgattgtgcggtgaatagcgtcacactgtttcgttagtatgattcttagaaagatgagggcaacgcttacgaaattctcgactgtgcatgcataagaacgcagcacaacaggtgctgaatagtcgggcgctctgcccttaggcttcgtgtagattctgcgcagcttgagcttctcccacatcatctccatcagctcgtcgatattccatccatgctccgagctaattgggcaggcgtctggaatccggtacagcaaatccaactcttggatggaaatagcgtcgatcttgttcagcgcataaatgacagggatgtagctgcggctcttggcttccaagacatcaatcaggtcgtcaatggtggcatcacatcggatggagatatcagcggacgaaatcttatactcgctcattacagctttgatttcctgggatctgttaatactcatcaaagaccaaagactctctgggagatcaacttacgtcgttgtcaatatgagtcaatggctgagtgctcgtgatggcaataccacccttgtccttcttcttgaagacaatgttgggaggcttcttattgatgcgaatgccaaagccctccaattcattctcgataactcgcttgtcaaccaatggcttgttcacgtcaaggacgatgaaaatgagattgcaagtcttggccaccgcaataacctgtcgaccacgacccttgccgtctttggcaccttcgataatacctggaagatcgagcatctgaatcttggcgccattgtacatcacttgaccggggacagttgtgagggttgtgaactcgtaggccgcggctagatgggcgttagagaaatcggttgtcaaggagggtctttacgaaccttctgaatgttgaccagtcagtttattcatcagtgtactcttgccgacggacgggaaaccaatgaagccactgcacttgtaagcgtatgcgatcgcaaatcttctcgggtaacttacacactggccacaccagtacgcgccacatcgaagccagctaatctcaagttagcacttagcagagtgttcagatctagaatactcacatccaccaccgccaccacctccagttggggtcagaagttcacgcttgagcttagcaagcttcgccttcagttgtcctgcatattgtcagaagacgtcatcggtgaaaagtcgtcggtgtgcgcgtacccaaatggtaagaggtgttcttgttcttttgagtccgagccatttcggactcgacctccttgatctgtacaaaatcattgttagtaatttgtttgatgctatgctcaaaaatctttgaccgcactcaccttttcaatagtggtcgacattttggcgatttgacccagcaatcaaaaatgaatcgaagaaaagattggaaatcctagtaccgagggactcgatatatgtcccttaacagccagcgagttgagcgacaagttttgaagaaatacacttgcgacccgtggacaatcttgtggcaccgcagtttttagtcagggcggggtgtgcgcctaaggcgacgagggcaagtatgtcatttccagcctgaggcatcatttcttatcgctatcgccaaattgcaacttgggcaactacatacctccagggctaggtaggtactgtggacattgaattactctacttggcctcaaatttcataatgaaaatacacggcttgtgtatactcatatcctagtttgtatctcgctgtggtggaccctcgatttcgtcattcggccaacttccgataccgcttctttgctacatagactttatcccaaacgcgcccagcacaacgctcattcaatatgccattcctcaacgggtctgagttgatcaccgagaaacctgcctttgagaagctcgtggaggaccttagttctgcgctgggtccaagttcgggtctggattctagcgatgtcgatcccatggagatacagctgttgatggagaaatacgtctcgaattcggatgaatgggcttcatatgcattaggtgatgcgagtaggacatacacaaggaatctgattgatgagggaaacggcaagagtaatttggtatggaaaatgtctccctccaaatgattacttgactaactcgttcagctgattcttgtatggagccctggaaaaggaagtacaattcatgaccatgccaacgcacactgcgtgatgaaggtattttttttttaattcgatacatgagtagaagctgatttgaaacaggtcctcaagggcagattgcaagaagatctatactcatggcccgaccaagagcagatcgagaatggccgaagctcaccacctcagctcatcaagcagacaacctacagcgaaaaccaggtcacctacatgtccgacaagcttggtttgcatcgggtatccaatccggaccaggacaactttgctatctcactccatcgtatgttctctcgtgtcgaaatgaacagaatccagactaattgatcagtttatacaccacccaacgccgcaatccatggatgtcgcatttacgatgaacgaactggcaaggccatgcacatcaagcagaccaactattattcgttccgcggtcagcggctcgatgatggacagaagtagtcttgtcgatgcccgttatcaataacgctcattgtggggtgtttaccttgtacattacctaagtttgccgaagtcatagcccctaatttggtagctgagactgttcccttcggatacccctcttgtactttatgttcaattacatattcttctccggcttttattcattattgaaaggcgttctgcggcgtgattggcaaaggaaatcttatttctggcatgtcatttactgggacttcttggatttctgtaattttttttttttgcttttggtcataactctattcagattcagaagaacagccactcatatgtaggcccgcttgctctacatgaaagcctcaacattcagctctagagtactgactgggtacttcaactcgtacttctcgagcacggtagggtgcagaataccgaaggagccaatgacctggtccttgccaccaatacagacgtggatggaagcagcgtggccggggaagtaagtgggatctacactgttagcgaatttcttagtctgtttcgaggaggtacacaccgtctagttccttgatataatacgagtcgcccgtaggggtctcgccctcgacgaggaagttggtcttaagcatggccatgatacgatcaagaagaccgtggacaatttcaaacccgctagttttaccatagaaggcagcagcaaagtgtctctcgttgcggctcttgcgctccagggacagatccttaaaggcaacatcgctgacctcgaatattttcatgggaacagagtggtgcttgttctcacggatggtcttgagcagacccgggagcaggctggtacggaccacctggaactcaagggtcttggggttagccagcttgacagcggtgtttccgtcatccttgcggttcagccagccaaagttctcatcatgcgagcacagaatcaacggtaacacctctgaccaaccggccatggcagtctccacacgaacaatgtcggaaagcttgttgatagggagaggttgggcgactgtgccagagatgttggggaacgcacggggcagcgagttgaaaccgtaggcaatggccacatcctccatgatatcacactggtggagtacatcggcacgggttggggggatttccacattgatgatgtctgagacagtggtagaaggcttggcgcggaaggccatctttgtgagaagagtacagatctctgccgaactgaggctcaagccacagcactggttgatgtacgagacttcagcctgagcgatgcggggagagatgtcaggggtgacgcgagtctccccgttatgctcagacacaatctggacaggctcgatggtgaacggctccaacgtatattgggagaacatggtgaccatcatcttgttcacaatatccagctttgtcttatcgagagctgtgatctcaattaaaacattggtggtgttcaggttgatcttcgagtgatcgccgttgataatgggtggcagagagcaaacagtccggtcggagtcgtagatgactggatagactggagagtcacgaatgatgtgtaggtacttgcccaactgttggtgcttctcatagaagttcatcaattcctcgccatccatctcctgggtctggttcaatgggacaaacttgatatccttgggagggagagcctcataagtgaaggggcccttcacggtgtccaaatcatgggtaccgattgatacaagggttcgttgccgggccaagttctggtggagcttatcttggagagcaatgaaagacgcataacgagcctggtcgaacttgatgttccgtagaatagcgccagctacgtagggtctgattttcgtggtctattttgatcagcggagcccttccacctgagcagagtaggtgttgaagtactaacatcttccttgacaataatccgctccatctgtgctggctgagtcaacttgtactcgggcaggggtttctgacccaggaagatgttcaacatgagcgcaatgccctcgaagcacagcaagtcatatctgatctcttcttagtctaggttctttcatttgttctcctcggatgtcacgcgtaccggttggcggggatctcaatcttgagttgcggaggttcttgctttccatcgacgatagggcggtctgagtttgtagtctgaaaagatcagtattggctatgtgtggtcgggtcttggagaatgtacatcttcgtcgagctcgattcctattcaaagtcagtcatgcccggcaagaatttcccagccaacctaccaaattcgaaacacagctcatcaaactcctccgtggtgtaactgcagcaaggtcagtagagttcaatgacaaagtccagagacgtactctcggcccaactcttggaaaagagcggccttgtcgaccgagatggtgggcatggtgggggttgctgattctggtgtcaatcagcgaaatgtccgataaatcaatgcggaaaccaagtaggcgactccgacagaatataaggaaagcccgtacagaaatccaggaagtagtgatcggtgcacaaagtattggatgactcttgcgctggtggaaattctgcccgcaagccaccaccgccacagatccccctcttttgtgacgatggtattggtatagtaattcccctccatattcaaatgtttgtgcgtacaccgccagtatgtaatttacaccagtaaacactcaaagctcgactgccctgctctggttgctgcatcatcgaagggggcttttttccttttctctttacgaatttgtatcaaatctattaatttgctgatcaaggtactcattcaattctcgaggtatgcttctgctgaaggtgtccatgcggccccaaacccccgccctcacgctaccaccattcatccccttgccatctcgcgaagtcggaactaatacttatcagccatcccattgcctcctacaccacctctgccgaatcgctgtcaggtccaacaccaccctcttctcatccaggaccgggactcagcgtgtctccttaatacatatccaaatccacaatggaaggccagaacgagaacgatgagctctaccccatcgccgtgctcattgacgagttgaaggtagatctccctccagtcatacagacagtattgagctcacatttctttagcatgacgatgtgcttctcagactcaatgccattcaccgtctatccacgatcgcgcttgcacttggacccgaccgaacccgagaggagctcatcccatttcttgatggtttgtccagtgttcaatcgcctagcagccccgtctaacagtaatagattccgtcgaggacgaggacgaagttttgactgcgctgagtgaagagctgggtaattttacagaatatgttgggggtccagaacacgcgcacgtcttgctctccccgctagagaatttggcggctatcgaggagcccttggtgcgagagaaggtaccacaccagctgaaagtttcttgaggcgcatgctaactttacaggccgttgaatctctcaacaaggtatgcgaacagctttcagagagccaagttgaagagtattttgttccgctagtcctccgtctctcaaaggcagactggttcacttcgaaggtctctgcgactggtctttactccacaccatacaagaaggctactccggcgttgcaacagagcctccgacagcatttcggggctttggtacacgatgaaaccccaatggtgcggcgacaggcagccaacaatctggccaagtttgtcaaagaaatgcaaacccaggtcattattgatgaaataattcccttgtttcaatacttggcgagcgatgatcaggacagtgttcgtctgcttacagttgacattcttattgcgatcgcggaggaaattcccaaagaacaacaacctagccacggcgtcttgttgacttcgctgcggaatctgttcgaagacaagagctggagggtccgatacatggttgccgatcgatatgaaaaggtaaatcgcctttgccgaatttcagactattgagcgacactgatgtatgcagattgccaaagctgtccacgaagaggttgtcacccgtgacatggttcctgcctttgtcaagctcctcaaagatacagaggccgaggttcgcaccgcaattgcgggccaaatccctggtatgataccctggttatatatagttgatacatgactaacacattcaggcttctgcaatttgatcgatcgcgacactctcctcaatgagatcatgaccagcgttgaagaccttgtctccgatccctctcagcacgtccgggctgccctcggtactcagatcagcggcctcgcgcctattttgggcaaggaggagtaagtatcctgcttatctgctagcaataacctatactgaccatccaggactattgcccatctactccccatgtttctccagatgcttaaggatgaattccccgacgtccgactgcacattatctcgaagctcgagcaagtcaacaaaggtaaatgctgtccaattcttttaaaatgtatgtcttctaaccctttacagtcattggtatccagcttctctcccagtctcttcttcccgccattgttcaactggccgaggataagcaatggcgtgttcgccttgccatcattgaatatattccactccttgccagtcaacttggagtcgagttctttgacgagcagctgagcgatctttgcatgggctggcttggggatactgtcttttccatccgagaggctgccactgagaacctgaagaaactgacagaggtattcggcgtggagtggtcaaaagcttctatcattcccaaggtgatggccatgggccaacaccctaactatctttaccgcatgacgacatgctttgccgtttctgtaagttcactttcttgctacatcagtcaatgctaattgtcagacccttactcccgttgtcaacctcgaaattattgagaactctctcctacctattctggaacgcctagtgacggatgaaatccccaatattcgcttcaacgtcgccaagtcctacgccgttctcatcgtcacactgcgtcgtctgccagccgataagaccttagttgaggtggagaagtccgaagagcctatcgcgccatcaccccggagcctggagttgattcagtcaagagttgtgccaagtttggagaagttgcaggaggatgacgatgtggatgtccgatactttgctacaactgccggtggcaatcaggatgagatgcaaacctctccttaaactatgcacttgttcggccaatacccaacaagacattttgtcaggttagagaataaccaagcgtccttttcttccaggcgtttttaatgtagagctttcacataacgtttaaccagggtaggtagtcaaaagcaaatgcgcaaataaagacgtgcggtgcatgtaaagccactagttactacaatacagttagtacatgcgtattagagggtaaagagagggctttaagccggccctggctagagtgcgccgggggagcacctgaaccttgtgattcatttgtcagcaaaaagcggcccctgggccggggatccagtccatggtcggactgcttgttttagttatcactggcagtatatcaaataaatttgggagaccaatatcaacatctaaaatatgcttttctaaaccgcagtgcgtctcatcggcatgtcgattagcttgtgatcctatcgagactctcatttatatgactcttcagtcgccatgtcgtggccataccatttcatttctctctcggaaaacgacaagctgcatcgcagggagctgcttgatcttcgcggctattacgcacaatggtcaatcattgttgtcatcgtcgcggttcgaatttttcgctttgctacgagatcaactgctaagtgggatggcccagtttctggaaaaacccgacagtatcttgtctgcgggctgtggctactatggcttctaggcctttccatatggaacagtggtgatggtaagtcttcatcttctggtaagtttgagcaacgagctaacatggaagattacctccatttgaccaaagcattggggcgagttggcctgtcccaactgccactgcaggttctaatgtctccggcatacatctctcggccggcagcctcatctgtactgtctcttcttactggtatccctcagccaacgttgactccgtaccaccgtctctttggtcgggcggtggtctctcttctgctggctcacgccgcgctgtacacgctgttcttcgtgcaatccagccatcctgactttggtatattgctcctcaaacgaatccaagacttagacgtccaatgtggcctagccgcgatattctcggccgtgctactcattctcttcgtgcggcctgcttcccagaagggactccagtcttggcttgtgcagggaaccttccaagaacgaagaaagatgttttactttggtcatgtgtctttggtggtattattgtgtgttgcggcttatattcatgtcaagcaggcgcagaagtacattctgcagactttggcagcttctatgcttaattgggtgtgctcttgggcgctatgttagtgtaggctgggaaaatataacatcctttcaaaaagaaaattcccttggtcaagatctcaatatttactctatggatgtaatatatgagcttgtgtagcatgaatctcattcctgagtgaggtccataggagtttttaatactttttttttttgtacttggttagatcttgtttttctgagacaacttcgatctacatgtatggaatttaaccccttttttctcccccttagtagtagaaacaacaaagagtgagtaggaagttcaacggtatgttgtataactatatagtacatgaactgtgtaccctgatatatattcgatagtggtcaggtttgctactaaatatgtttctaccaatgaattcctgaacgacattcttagttttctgtcgcacgatatacatcgatgtactccgtacggtcgaggaagtcaaagcacatttggtgacacgtatatgaatagattatggcgtacctcccctgcatccgggcaacgccacatactaatagattggccccttggagaattggggccacacaaattaaaacatcatattaaaacatcactgatcgcctttgtcttttagaacgcttgaacagcacatagatagctaattagattgtgacgattacgttagaaaggcttggcggataaggttcactaatagcccgaggccaactctagacttatggagaaccctcctgacgaccttagcctcgctctctttcttcatgcctccccccaatggcagcatgcgcattcaacggttgattgtattacttgcgatcggcgttcttgcctgtctttctctcctactactacgatcatcgaagcactccgagccgcagcccatagatttgcctcctcccgaaccaatacaacaccctcagctccatgcggggcagaacacatacctccccgaaaaggaacacccgatcacgcgtctggttggaaatgcccaacaagatttcaatcatgcgcagtcccggcaatccaaaaccctggccgaggccgtgactgaatacaagcgtcgctataatatgcacccgccgccatttttcgacaagtggttcgagtttgcccagtcgagaaatgtgcagctcatcgatgatttcgataccatctaccacaccctcctccccttctggggtgtgaaacctagaacgattcgcgaacgggcgcgcgagacactcggatttgacaatgcgatgatcggtgttctaattcgcgacggcaaggtgtccttaacggatggagggggcgacgccggtaagtggcagcgagacgccacggccggtatgatgaagtctttcgtgaaatacttgcccgacatggacctggtgttcaacactcacgatgagccgcgcgtaatcctccccagcgaagacctccagcgattggtgcagacagccaaggatttcactatcccagcagcgttcaagaacactccgaccaatgcgtggtccccacgtgcttcggacctaaacaaaggcgatcgcatcgacgaggtgcgcaccactcgtttcaaccgtttcgcacaccaaccgacctggacaaattcccgagtatcttgtccggttaacagcccagcgcgctcgctcgaagaaaatcccactgatgacgttgatccctatgcctatggcgaactcggcttcatctacaacaccacggcggcctctgacatctgcaataccccctccctccgccatacatacggattctttgaccgacccaacgcctttgatgtcgtccacgatctgttccccgtcttttcacagagcaagatctctagcttccaggacattatttacccaagtccttggtactgggccgacaaggttccctacgatactgaaaaggactatgcttgggaggctaagaccgaccgaatgtactggcgtggctctacaaccggtgggttttcgcgtgcgggtggctggcgccgacaacatcggcagcaatttgtcgacaacgtcaacgccttaggcaccactcaaattctcgctcgccagggggacagctgggtttcccaggttatcaaccgagacgcctatcgtgattccttcgatgtcaagttcacatttatcggccagtgcgacccggacgactgcaacgcgcagactgcgtactttggagtgttcaagcaggctgggcaacaagatgcgtgggcgcacaagttcctagtcgatatcgatgggaacgcttttagcgggcggttccacgctttcttgcatagcaacagctttgtctacaagatcgccatcttccgcgaatggcatgacgagtggttgaagccctgggtacattacgtccctctcagcttgaaaggcaacgagtatgtcgagagcatgcgatacttcacttcagaagaagagggcaaaaaggccgcccttcaaatcgctaatcagggtcagcgctgggcacagcagaccctacgaaatgaagacctggaggtttggttcttccggttactcctagagtaaggacctcgtcattccatgagagaattctgctaacttgctcacttttcaggtatggtcgcttggtagacgacaaccgtgaacaactagggttcgttctttgatctgtatatattcccttcgacgagatgatggctttttgtttttttttttggactcctgttaataccccctttcccttggactgtcttctaccaataatatttgtgcatgtggaggtggcgttcggtctgccatagattgagaaaagctgtaaactgcctacaatttacagtgtaatgtgattgcaatcctagatttcatcctgatatcatctaaattatctagattatggataccccgtacctacatatttagatgtaggtacccgctgtcaaccgttttatatcgctgactcaggcgtgacgctacctgtggaccgagctccggttgccacagctctagatttattacaagcttcttcttgctccttcaacacatgattccaatatgggcaggaccatatcccgcgttttgatcggggcagctgtctttgcctatggcttctttacagttattctttacgacctcgttgccttagcgaaaggcacctactttagacgccccactgaaaccgagaaacgagacctacagcttggtgagctatatatgtaccaatcgtgaaggttctttgctgactctccagctcgtgctcgcctgtgggatatatctaaagatttcgaaggtctctctcaccacattctaaccttgcaaagcggattcaagttccattttgttagtaacgatactccaaacacaccgaaaaccgtcaattccgataaaccattggtcatcttcatccacggattccccgatagctgggcgatctggcgacacattatcaaaaaccctgctctgcaagaggccgtttcactagttgcgattgacctcccgggatatggaggaacagagagcctggaagaatataatgcaacaaatgtcttggagaaattgacagagctgatcgtcactctgcgaacccagtatggcgtggactcgggcaacgagagcaacaagaagaggacgataattgtcgcccatgattggggttgtgtcttgtccatgcgtctcgctgccgaagctccgtccctagcccatcggttcatcctgtccaatggaccatcagtatgtcaaaacaccggggaagatgttatctcaactaacgtttcagatcaaattggttgaatctaatatccgccgtctactcttctcgactaataagatgctcggcaacgcctggcgttcaccaatgcatgcccgcgtcccgctgatgcaagcactccgaagcttcacccctctcgcccgccagcttgtcctatccggctatatctttgccatgcagctaccaacgccaattgtctactacctcctgtccggaggcaaccagtcactattgaaaatttgccacctcacctcctacaacaaggacgaatatacttccctcgacgtggccaacagtatggccagcaccatgggtccgtccaccgcagaatcggatactaaaacttccagcggtgatgcctatcctgccaacctcagccagcgcgcgttcgcacatgtcatgcacatggcggcttattaccgtgatcgggcggcgacggcgtcttggaccaagtctattgaaacggtcgctagcttacacagtatttcatccggaaagcgactgtccagcagcggagctggactgtttgacgaaggtcccccgggcgctctcaaagctagcgcaaccattttctggggcaaggatgatattgctcttgaccagaggatctgccttgatgggatgggtgattacttagcgcagggatcccatattgtgctgcttccccgcacgggacattggacgccggttgagcgtgagagcggcgcagctttggtcaagactattgaatgggctgctcaaggtgaagagacagacatcgggacggccatcgctgaatcctacccgggtgttcaggtcaccttttcgcgataaacataggcaatatgtcggacgactccaatattcaacgttttcgttttgcggggcaacccgaactaaagcggctaggcgatgtttcacttagaccagaccgaccacttatagaagatggattccatatatgctttgtatagaagtgtagaatagcatagagaatatcggatattgagtccacgaactgtagagaagaccgaaaacatacggagtacccaaaagagaagtccagcgggatcgctgatttacccgaaaccactccacttcccctcgggagctttgaccttagctctcctgcatcccggcctttgctttcccattgcctttgcttctctcaattccacaaaagatttcttctttacacaacatgctgtgaaaaaaaaaaattcaatctcctgttttcgtcgcccctcgaacctgcggcccaggtaccacagtcggtgtattgggctcctaccggcccgaactttccttggcgattgacaggttaaatatagccccgacagctcttctcagctcttctcgtcttattttggggggtttttcttctctgctccagacttctttgggcgcctgatcattctttcgctgttagactgttggatctgtggcgtgatggattccaatggaggagcagtctactgcacggtattttaccaaccccccccccctatgcgtacggcgtaaactgaccgatgagacagcttctgttgagtgacaattatcttcccggtaagttcccattcatgtgggatgtggaattattctaaatatctataggtgctatggtccttgcccattccctacgtgacaatggtacaaaagcgaaattggtggcactctttacgccagaccgactacaatcgaccaccattgatgagctaagggtacgtacagcatccccataatctcctatacttttggcttacctattagaccgtctacgacgagctggtcccggtgaactcaatggtaaacgacacgccggcgaatctctggctcatggaccgtcccgacctaattgccacattcaccaagatcgagctctggcgcctgacgcaataccagcgggtcgtataccttgattgtgatatcatagctctccgagcccctgacgagctgttatcactggaagcagactttgctgccgcgcctgacgttggttggccggattgctttaatagtggaatgatggttctccgacctaatctacaggactactatgcgctgagggcactcgcccaacgaggtatcagcttcgatggcgctgaccagggtctgctgaacatgcatttcaaggactggcataggctaagcttcacgtataactgcacgccaagtgccaattaccagtacattcctgcgtacaagcatttccagagtaccatcagtcttatccatttcattggtgcccggaagccgtggaatatgccgagacagattgtcccgctggagtctccgtacaatcagcttctaggccagtggtgggctatctatgacagacactatcgtctgccatttgtaagtggcatgaaagactatgaagatatggactgacatttttaggtaccgaccacgtcagctgagattgaaaaaacggcgttggctcaaggtcctgttggagatcccacgagcttccacggcaaatcagtcgagcacgaacactctgctgccgttcctgttttgagtatggtaccgcagtatgttcgcggagaggagcatgtctcaacatttatcccaccatttcctcccgcgccaatcacttttgcgcctcgactgagccacgaaacatacgagccagagattcaaacaccgacacaggcacagctccactatcccagtggccatattcaccaaccacagccgctggtgccgattcgtccaattagcgagtatcaatcgcccccatctccggccccagatgcctcgacctttgaggcgccaacgtgggatccttcacggtgagagcttatccctcggcgtcgtctacaatgctaatatcccatagagagccgccaccggtcaacacgagacccgaaggtattagcttacaacagaaaacctacaatatgtctgaagacacgcatctattccaacccccgtcatcctaccccgaggcgccgaaaaacatgtggtatgaggttccagccaaaccagagcctaaacctactacggtcttcccctgggagcaccatgctccgaaacccacccgcgtcttcgccgaggcacctgtagagttagtgcaaactcccacggtaccatcagaaaaaaagcagcattcacctccaagcgagtctactcctcccggaccctcatcttcttacacccgggtaccatatgaacccagtgccgaatcatggcaaacatacactcgctccaacgcctgggatgaggacccagagattcagcgctatattgagacgatccaaggacggcgcacaaaatcacaagtgaccagcccgggagctcaatccaacagccccggaaaatcacctcccacgccaggcttccaccccaataccaaaattaccgactttccaacagaagtcgagcgccccagtctgcctgtaacgccggccccgatccaccgcaccagctacgggaatgaagcctccggtacagccgctctccctaccgccgagggcgtgtgtagccaggaggaatgggtgggtattacggctgatgtgttctcttctctcctcagtgcaacgtacttattatggcggtttatagaatcccctggctcagctcgaggagctgcatcgtcagcactcggaggttttggagcatcccgagcggctgtctagtcggcttgccgctgcagcatatcgtgagcgttgacagtacttattccttttcttttcttttcttgtctttctgaattttgggataatctgactttatttgttttatgattgactgattaggagatgtactcgatcttgtttgattgttgttgcatatgcatgtgtatggagatttcatgggtgatattttgttatgaaataataactgaagggagcattgaattcttcctacgcttacatttcaattggagatccatttcctaggagatatgaaggaagtctcaaggctttaaattagttatttctaccaaagagtgtgtcgttggcttgatatacgctccagttcgaaattcctgtcacttctgaaccaaagtaatattgaacgattcgatccgattcgaatgtggacatgaaatcgatatcccctcacactatacgcaaagtaggcaccaggtaatcgaggaactcgcacggaactagacaacagatatcgaggctttgattccggtgtatgatacctgatattcaatggcaagaaaagcctctcctggtcaatgtagaccacacctcgaacacctttcaatgcgatgaccaacgtattggccagtacaaattataggattgcgaataatggctttgaaggtcatgtaattttgattgcgtgaggtagagtatcaggttaggttaggacagaaaaaaacatttactcctgagcgaaagtctccgcaccaccctctgcctctgcggcctgctgctcggcaagacgctgctgctcggcggcctgctgagcggcgatagccttggcaccgtaatcctggctcataggctggagaacgggctgctcctccttgggctcgatgatagtgaccgagtcggggagagtcttctggggaccggccttgccctcggggtcggagccgcgcatgatcttaaccttgataccgaggacaccctggcggagaagaacgtgacgagtggcggagtcgatgaactccttggcgggctgaccggagtggatcatgaaaccgtcctgttacttgttagccataatattcttcaaaagctcgttttgcgattgattcgtccggcgcaattcctctggtatagacgtacagtgaacttcatggacttggcgcgggcggcacggagctttccggacacaacaacctcgcaacccttggcaccggactccataatgaaacggaggacaccgtagcaggcacgacgaacggcaagaccgttaaggagcttgtagcggagggactcgcactgagcgacagcggagagaccgcggttctggaccttggcggcgtagagggagacggagttctcggggaacttgaagcgcttctggatgagggaggtgagctcgcggatgcggcgaccctgctcaccgagaacctcctgggtgtgggtggcacggacaactggaaagcccgttagcatcagatccccaatcgaattccgcagatcccaacgcgatcgtaaatcgtcctcttcctcctctttccaggcaatttcaccagcgattttcaagcgatcacacgagggattggtttttcggatttgacgtactgatgtcggtgacagtgggagtcacacggacttccacaccggagtagccctcctcggccagctcgcgctggaagaactcgttcagctcggcatagaagacaccgtcggcgacgaactttctgcgcttagaaatagctccctgaacagcggccattttgacgttcctggtggtggtggaatcgggggttgtcgacggaggggatcgtggtcgagagacttcaattctgagagtgcattatttagtggggatttttcgggactagggctgcttgcccgtttgggccagggctcaaccctcgcttgccggcgcttttcctgtttggtcctagtgttgttaccttatccctgaggcaatattcgtaaggcaataaggcattacctagtctacggattacgagttaacattacatcgaactatacggagtactccgtcattggacgaatcattcatggttgtttaaacgcagatgcataacatacagttgtaaattcttgcaaatcatatctgattcctttgattatcccgttcattgcatctctacttctaactcggtcggtttatcggtgcgctccgctggaaatgcaagcttagatacacccgacgtcacagcagctgccatccccgagacatcagtcgttttgacagcactatctggccttgcagtctcaataccagtcaacaccgtattttccgggatatcactgggtgccgatgaggaacgggggccgttcatctccgcatctgttcgaccgaatacctcattccaccaccgtgtttcattgacccggggaaatataagtcgttccttgccgcgctgattgtcatcaatgacagggtcatacagatggttcgtgaattgttccctgcgagcgaggaaataatcccaaacgctacgggttcgttcactggctttccaatccacgcgttccttctcgttgttgaacaaaaatgtgccatattgacaggagtagagatgataaagaagtcgtcgcaggaaacgctcattaaactcaaaccgtgtcggatattgatgaagcagctgatatgttgcgtctaagaactgatggaacacagggctcgtctcttttggcttagttatctccttctcgggaacccccgagcgcggtatagtaggcttcttcgcaggagtgtcagagtcataggtttgaagctctccatccaagtccggcaaagagtcacggctattgttgtcccgaccaaagaatcctttggcactaaggaatgcattttcaatggccttgcctgcacccccgccgtcaccaaatgcacgatttggatctccaccgatgcgttcattttcaatctggaaccatttctcgctgttcaaatgaccagaccggtgtcggaacatgtgtccaaatgaaagccagtctttctctaccagcaccatgaatccctccagcgtccggaagtaaggatccaaacaaatctggctcagcgcactgagctgactcgtgcgatcccagccatcagagcagtggatcaaaacatgagaatgagtgagaccaacttgccgagtaatcagcctggctccgtccaagatcccgccaatgtgcttcaaccagccgctgcgcgctagctggtcacgatttggccctaatggagtaacatctgagtccttcaaagcatcgatcactttgttcagcgagtctcgcatgacgtggatattgtcaataccaagatatgccttggtagcgaatttgtagttgtccatgttctctgatccaagtccaacagcctgcatggcaaatgcattcaccgtagggcgtgcgtccactatcagattagactgctgagcgccatatatcgagcgatgatcttcagaatcgccacttgtagcagctaacaggtcgtcctcgagttcctcggcattggtgaattcggggactatcacctggttcatctccgggctgctagaatccgtatctttctccgtgaccgagaaactcgccaatggccgctcagagcgagaagtcaagaaaatagcggacagaagcttttcgtcttgaatgcttcggttctggcggacaccgacgagcggctgtgagcttctggtaatggtgcaattattgacagggtgaaagtatgtgagggcagggattcttgctcgagatcgatagcgtcctgcgtaattaagtgtattgtcggagatggaacaaggtacgggtatgagagcgggatacgtaggggagaacttaaatgtgttagtagagcacatttggactaatttgtgcgagcatacctcgtagttcatgttgatctctgaaagacgccatgctttcccttcgtccaagcagccctggcgtgcccattccttgcgcgggtcatacagctcccacccattaaactccttttctggcgggggaggctgatagctaaaggcgtaaagcttatcaatacgactcgatttgcacgtccactgtttgatgctctcgaatacatctcgtgctttgtgctcatttacaaagtaaaaacaaacgaatgtgaagtctcggcatcggaggcggatagaggagagctgacgggaagcggcgggagctggccgcagggtgcagaaagcgatgatagggtatgtgatccacagctctctgggccttgttatgacgccctttatctggtcttctggtgagattggtggggtgtgcgaaaatatgaggtggtgaggggttagatggagggtgccatcgacctgctctccgcggcgagccaaggtcacattgtcaacctggagtgacatggtcagtgattggtctgtggtggcactcaagatatgtttttcgaaccttagcaatccgtgttttctccatgccgtataaatcactggcgcatggtcttcatgatgaatatgctgggtgaggggaacagtaggacaggagaagcggagaatcggagggcagcagtgatcacgagtgagatggaccaatataggtatatataatttaatgtgggtctgtaatcaattggggcgactactcagtctcaagcacctgcctgggccgccttggagttatcgtgaggcgcgcagagtacatgtagttgggatgagtggtgttacacgtcacgggccttgatcggctgtggggcctcaccaaggtcacgcctacaacctatattatgttctatgcatttttgcgatacccggtcagaatagattaatttcaaatgagaaatctcggcctatatagattaaaagccaaagcataatccgtgtctagagcatatatattttacataatgtacagtaaatacaaacccaagacgccgccatgatggccgttgatgcacgctgtacaaattcaaaatagaagtgacccatgctattaatccacgtatcttttgccgtggattttgaatgccatgtcacatgccgcgttgtagaacgagtggaactcatgatcaagctgctcggagtggttattccctgcggccaagtcaatttgaggaatctgcatacccagagagacctcgtttgtccgagcagcaaggaacgaaccgctttcgtagtaccggtagtcaagcggccgtccatcaaagttgtacttttggataacggcgcctcgaatgtcgctgagtggagggaacatgtattccacagcgatgctgctctctgccattgattcgtctgacttcttggatttggttttttgcgaggcaggctggtgaacaagatcacagggaaggatgatgttgcaaaatataggaatgtgaacaggaccttgcgaagccccactgttgacaattgagccctggagtgaggttttaatgctttgcagcattacttggatcgggagcgaaaaggaagtctcggggaagaggtgctcagaggagctttgcgggttttctgagttgggagatgacttatacaagaggtcttgggagatagttcgtgtgaaacgcaggtccagaccattttccggaagcaagtagtcaacgctgtttgtggcgaggatagcctttacgctgtggacgtccacgccattcaagtttgaattcacggctatctcaatttcgagttccggtggggatgctgtgtttgaggttggagacaatcgaagtcgatatagctgtgcctcgttcttcgggcgaataggcgtgagtgagttgatgaaacgcgacaccagaggtacgtcgtttgtgaaagcccgtggaagggagagtctccctagctgtgccggactgatggctgtatcatcgaaagagggcttttgcataaaaaggcatttcccaaccacggctgtcacggattcatgcaaaccggcgacaaaaccgttcttcggaggagtaacccggagaagcttcaatagttcatctgagagtcgtgtttgatgcttgtcgaagaaaggggtttcgagggattccgcctccgcgttttgactggaagacattgcccagcggaaccaagacttttgctgctcgaaccacgaagcatgactttctggtttgtagctataggcactggcaagttctgaagcaggtaaatatgttgaaaatggcgtcgatggagatgtagtgttggataaggccaagttcaaggtcctccgcgcattatccgctcccaacttattctcgttaagatagagaatcttttgtggtggtctgtgtgctcggtgttccacaaatacaccgtgtgtgctgttgacccattccaaaaagtctggtgtaaaaacttgacttattccatctccatgaatatatgggttgattccaacatcatcctcgcggattctgccagtggcatcaatgataatctcgtgcacagactcacaatcatctcgcttgccagtaagtgatacaaggcccgcagattgtgtgacatcaataccacagccatggagactagctagctcatggaaagagaaatgctcagcatggagaagcaaggatatgaattgagctggtatgcggaattccagctggccacgctcgccatcagccaccagctgccaacaattccgaacgatcgtctctgcagcccgggattttcccctgaagcccttggtctttcccaataacgatttggagttacttgacccccatgtccaacctttctcttctatcacagaattgcggttgtactctgaaataaactccgacaattgcttgtatgtgaaagaggaagctaattttgaccacaatgccttgagatcggcagcaggcaagatctgtcctacttgatatgatccacgaatctcatcaattctttcatggactgacttatcgctgggcgatgagttttcctcgttaagttcatccaacatggtgctgattgtgccggcatattcattcccgggctttttgttgcgattgcgattcaacattcggcggcgacgggaaggcacaacaactatttgccctggctttccaagcgtatccacatccaatgtaaacgtgcctgtttcacgttttccattatctttctgttcgcggtttcgttcggatttggggccatcgaaagcgtcgcgttcatcatcgcgactccagttactctggtatcggggaagaacagcgtgtgggtatgacaataatggtctccgatatgaaagcgactggaagctcagaagccccagcttgttccctgtggggcgtcgaagcatgacagaacaataggtctattgcaaacctggtgaaggcaaatatctgtgatcacttttctccggcgataatcggggcgctaggccgcgataagaaaataattcctgcctcaggcagaattccctatctactatgtgtacgattttcaacaagaactttgattatgtaggacaacgctctctcagatatctctcctaattccgtgcgaaatggtttatctaaagtagatgattcaaaccatatgctaataagtaacgcagaaaggtatgtagaattcattcctttggtacaacttcccagctgcgcaagtcctctcttacatcgaactcggaaagctcattatttgtatctggcaccttccatgcccgacccatgaccccctcatacaactgctgctcgatgcttccacccttcttctgatgcccaagcgcagcgagagactctggggtcttactgctcctatgtgagcgattgctggaagaactcttagggcgccgctcgaaacttggagacaattttttgccagaccggctttgtcgtggagccgtctctgttgtcaataggatatcacggcgatcgcccgctgagatgccagcgtgggaattgtgtgcatcgttgttccagcaggaacttccagcaaacaactcttcaaccaactgatcagcaggcaaatcaccagctctggaagaccacgacgctgctaaggtgcgccgatacatgtcttgcatatctgcagtctcccggctcttgctgtcaatagacggcagctggccaaattcatcggcgttgacgggctgatcggtggattgaacaactccggcgattcctccaaagacagtggcagatttcagatgtggtcttttgtaatcagcattgagagtgtgggtcagaaataagtttagggcttcacttacgtcgtgaagttgcggtctccttctagctgacgcatcgcgatcccaatcttgacagtactgttcactttactttcatgcatcaggtatcgccgaatgatcccttcgtcttcctcggttttttccacgtattcagcaagattgagtttgattttgcccagcacgctcttttcggacatgggcgacgaggtgaactcttgtatgacttcaaaattgagttcacactcctgaagaattgatgtcctgtcaattgtaagccttacttgaaggcatttctcataaccccagtaagcgcggtgatctaatagagttgctttctctgtgtagccttggtgttcagtggagcttgacgatggcaatcgccatcgcacaaaagcaacgctgtttcccaaggggacgttattgatatcgatgatctttttgaggtcagaaatcttaataacatttcgacggtctgtgtataatgcatacccttaatatgagctcgaacctaggctgtagcagagtcagttacagatgtaattcagtcggctttattggttaacttactcgtctattcttggggactatggtgagtgtgttagcttacatcaattaacaggtatagaggaacataccaaatgcctgcatgttaacggtcacgtcaccggctcaagcttgtgggaactcagatgccacaagcacatcaactggtccactcaggaccgacctcgaggaaatatctcggtctgaggctgagaagaaactcaactagcatgaatatcaaatgccaagcagtgatagcgtcgtcaaattggctaagagtcctccccgcatacaccgtggacattatgggcggtgaagtgtcataacatggcagaatcaataaccagactcgccagtatccatctcacctcttctcccaaagtctcaggcgatcaatacctgttgcttgcgaaatagtaccatttctttcaaccttatatcgctccacgaccatggtgaaacccgagcctactcctcccgcttcatctctccctgccgaagccgcaacagtccctttggattcaacaacccgcgttaccccaatccaccccgatctcaccgaaataaaagttccacaaggggcactgccatcatattgctatgacccagtaacatgccaaccaatcaaacatcgggattaccaaactgagcttatgcaactggaagaacaatacaaaacacgtgaggcagcgctccatgcgcaggaagaaattgccaaagaggtgaaagagaagattgagactgcggaacggaaacgagaggaggttcaaaaatctattgacaaaaaggtcaaggaacgcgacaccgagatgaaggtcgtgtccaagtttcaagagaccaaggcatcggacattccgtcttgagggaggtgacagcagcgctttttctaaaccattcagacgacaaaggagtaaccaaggttttcttcacgctattgtcaccttttctggcggacagcctacgcttcacaaaagaaatttaattcgctttcagctcgaaagaactcttcatctataattcctgtgaaggcaactaccccgacactcactatggatcatatcattgtcaacaattctttagaaagaacatctctgtttggtttaaatgtggggaggcaggcaagctaaggaacatttgcgcctatgtctatccgtgtgagagttcgcttgaacactatgccaatgggctctccaatctaattccaacatcttgaagcgaacgtcactcgactctttggggaatttcagcacaatgataaacgcctctcgcgcacaataccaactcatggaaatcgaagagctattatcacatgtcaaataattctcccatctaaatagcaacccatccagatcaaatcgtcggaaattcaaacagcatcaataaaacaccccgacatgctttgagatgttctgtttagacgtatagaaggctgtgaaagcatagaccatgcagaggactttcctatgtacaactagagatgtcagtgggaatggggtgattggacccgatgccggcggagaactacgctttttcgttccgttttcacggtttcgagcgggctgtctatgacctcccaagccgccggcgaggttggggttcatatgtcgtcaatcgatccgtccactgtctgaagctagttgcttggacttacggagccacgaatagcgatgctggattttacgacttgcagatttagcatctcgcttggtttgcgtggtttgcactatgattgctttcttgcttgatggtattaatctcgtttgacttaatgtcctgagcagatatcgcacttgaccgctggtttcgtctaacgagacgatgcattaaatcaagccaggaaggacagtgtcgggccctatgataagcgtatctcagtgagaaaatgaaccacacccttcgatcaatagtgtttcaagttcactatcctcactatgtttcgttcaaccttgctgagggtttccggtctacgtgattcgttccttaacaatggcatatttgaccttggtatatgctcccccatgaggcgggtgagtatatagagctgcggagagaacaacaatgtatctctataactatctattgttcctcgtgtagttcctaccctcctcttaactttatcccggagagccccattgtgtgataatcttctcttcatatgttttcctcattcgctatgcttttctaatttttggaattacatcctcatacggtactcggccactctatgctcccctatgctaaaaagaaaagctccaacagtcattcgatgctagatacacggttcccgcattgctacatagtttacgtcatcgtaggaatatgtgtcaactcgcctactccgtagtagaatataacctaacaatgattgagaacaaggtgtaaggctatggccctcaacacactatacagacgtttgtgtgaaaagccgccaagagatatgccatctcatggccacagctagagggagttattaaggccgaagagatataacaggtaggagtaacgagtttcttattgagagagaccaccacatcctgtcgaataataacccctaatgacaactcagcagtattcttacgtatcgttattccaacggcttatcagaaaaccgagtccttgagttgtactatgaggaagcgacaagccataccttactggtgagacatgaacgatgaggctcaatatatgtattcgttaatgtaatgtattttgtcgaagaactgctcttcggagctatagggaccaactgaaaaagctaaatgtatagaaaggtacaatttatgctcaccgagtcaatattatgtataaaagagtagtcataacaccacaatgtttaatgctacgaaagatgtttttacgctttctcagtagcgatgtcgttaccatactctccgacctgacttattggtaaggtgctttgtttccaaggctgccaattagcataaaaaatgttcggagattttcaacacagccaaacgcattactcggaggtttgagtactacccaacaataggggatgtctaggaagaagaaaggaaattctatcagggctgttgcaaaatgaacaatgatttgtgagtcacgggtttcatgatcaagtgtaccactcattcatgaataagccccttgggtatattccaaaagcataagtcatagtaaagcagttgcttagcatagctaaaagcaatgatttattccggattcacctaggagtttgtccaacgaacggtatcgcgtccaatagtagagcattgtctagcttcgtttcaaatcgaacatcatcagacacatatgagtcataacagatgcggtctgcaaaatataatggatctcagatataactccgtttatagtgcagtgatgtcaatattccaacttgatggcagccttgacaattacgaaactaggcttgatagagctgggtttcagtacccgcctggctgtggatgtggttaagatctacctgagattccagctctcaactcttgccaactcatacctcttctccagtgggttttcagcaagacaagtgaagtggacagagggaggcaagaaaatatacggagtagtaagttactactgtactactccgtagtaactagggctttgcattgtatgtccatgtggggccggagatatccgccacaacgtggcgagtaaattgcaccgcctcatatctattttaggaaaagcgacctcggtcgcatatcgttaggccatgctactctatagatacacaataacaatgacgaaagctcatccgactcaaagcgaaccctcatacacccacacaagaccatgtgaccgaactcatatgcagcagggattccattttagggaagaggcagaggcgcctgcggagtacagagtaagatgagatcattgaagacatgaatcatgtggagaaaacaataggaaacggtatttcagtacgtgaaggctagtggcgccgacccaaagtctggcaatggaggctcagcccaatggcagatcgtagcagggatctcagcttcctgtgcattggccggactcggttggtctcagcgaatcccagccctgaagtgactcaagacgggctctgccccacgcttggtcgaccctccatcagctgaggtctacgactctgtatcgtcctagcggcactcgataggtccaaaaaaaccttgatatggttgatatggttgttatggatgtgtttcgtgtaatttgttaatacagtaaaccttggagtattattttctcttctccaaggctaatatccagttggatattgaagcacaaacgatgttgaaacagaaaatgggatcgaaactaaggcttggcctgcagccaaatttaaattagagtcttcacccaagcgtggaatctttagtgttgaggatcctgtatcttttttaacgatgtgtagatcttggcgcacactgaaatatgcacatcgcccagctgagaaatgtatattttaagtccccgctagttgtagatagtaatttgatcgctctagatgatctatggagactcaaatcttcctgtttctttccgttcacggccgtttccatggatcattggggcttagctgttgcagtttagggcaccatgcagctattctgaccaaatggacgtgcaacgggtgagactggcactgtgcgagtcaacctgtcaaatttgatgaaacgtttagatgtcgcgcatttcgaaccgtttcaagtggtattatcgccactgagtcttcaggttgcagatcggggagtccgagatgtgtatgtacgtactccgtacactgacattgactccatcaagctgcataccagaataataccgtagaaaacttggtttatatgttttttttttcctaatatgtcctaagagccaaaaaaatagaaaaattaacatattattgtggccattaaatctccgcttatggtccccctcttaattattattcttcttaacttccctcttttcttctataacctcactcttgactgactttcatgtcatctcctttcttttatattataatttctgttctttttgcgcattcgcccgcactttaatactggattactcgacatatcaacccaatctcaaaaaaaatccaaaacttcttgtgtgggcgaatgtcgcctttatgattcatgttctatattctacattcatttatatcaactataccaacgccggacgtatcacctttcgcacagtgtcataatgcaaacaatcttactcccatcttctgccgctgcttttgcgccgcgatcatccccgaatgtcgtgttgaataccaaggttgagccttggttgacggccaccctgaagcgagttaaccgggtcaagcgtcctttgaacaatgtcacccagcatacccggtgtttgacggaaacactttcgtcaaaaaatgcaatctggactctatgttccatgatgttcaccaaggccccccaggcagagctagagaagaacgagaaccagctttgggaatccctgcacagccaccaaatgattcacatggaggcctatgttgtacatgtcgacatggtctcccgcaacgaggtggttttcaagttgactccggaaaccatcgaatccctggttgattttcacaaggatgtctactcggtggatgccgccgccaacacatacgactggccaggaaagcacggtgagctgaagaggttacaggaggagtttgtccaagcagccaacaagtttgtctaccgtgccaatgcccaggcacttgaggggctagaagaagacggcgccggagagctactaagcggtcgcagcgacgaagcaaaggcagccatcggcaagctctttgtcccactggttgccccttcacctccagtggtggatgttatgcgcccaattcctctcctgcctagttcgacaggcccggaaaactggtggcaaaacccggtgccccaacaagcaccactcgagtcgtggaaagtactgtcgcccagccccaacccggccaccacgggtgattctaatccgaatctttgggctagtctcagtttcagtgatgcccaacttgcctcaccgaccccgtcttacagccaacccttcactccttcgccgttccagacctacaactgcctaccaaccacctgtatgccaactacctgcatgccgaccacgtcagccgccatcagtccgctcccgttgccgaccatgttcccaagcatattcccgagcatgcttgtacaaccttgcagcacagctttcaacatggggggctttagctgggccgactttgctccgctaccgtatggcacgatcgtctagctcagccctcctgagtagactcagtgatgtcgaccatctcaagtccaggctccctcggttcatacaacgtgggttcgagaaacgtggatcgtttcttagaactagatgtgcgcgcaattctttcggtttcttcttgactccccaactcctctctctcgtctctccctaccgggaacccgattccaagcaacgacaattcgcatccttgacggcgttctctttgatttgacactgtgcatctgtgatactccctcctgccttttgcatgataaccagaattatctttttctgcgcttgttttgatagttttgatgtttgattctagcgccagcgtgtctttttttactctttctctttttcatttttctttgcattaagaagcggcgggtcggctctctgttatgtttcgtttcttttgttgttcccgcatatatgtcatgaagactggtctgcctcacggcatgtggaggatatgaatttggacgtggaatgtccaacgttatgttttcgattcttctaccgcaactcctggaaatggaagaaagcaagtatgggttacccgactggactgggttcagcgtctgcctttggtttcctcctttcttacgaggtctgtccttctggtactggttactggactggctagttctctttatctgagaattagaggatatgtttatgcgatggcgtcaccttcatccatgtatctgtgatacttgattggagcacgcatttttgtcatctttggttcaaggaggtgcagatcagcaacacgagtgtgggagaagattgccttcaacccttgtcagactcgagtacatccgcctgtggcagattccgagcgcaaagggcgatgcactggatttcctcctttggtctgtgacctggggatcttcacattccgccccaagcggcaagtggtatgagtggcagtcatctccgtcctctgtgctacgaactcacctctaatggccatagttggctgatagattcatcttctatcgtccaggctggtttttagatattcctggacaagcttggtctgtcggtgggctctttcactggatgtaagagcccttcattctttatcccgacgacaagaatcagatgctcgatctgatagatactctcctttatgatctgtttggtcgaggggctggtccctcgcgctggttgctccttttctcctggtcttttttgttgatccatcagcagctctgtccaaatcttccatgtatctctttagcttagttttgaaaagagcttgcacaatttcttcctctcaatttgtacctattcgtcggaagtaaagtatcaaacacagtgtccggcatttccttatagaataagactcatcataacaaaaatctgaatataaatacatgtctcaagatccagatgatgttggttgtgtacacagttatttaccccaggtgtatgacgtcaacgtcaaccgccaagacagcccggcctacatcatatccaagttgatcgagactcggcgtgtttcgttcacaggtcacttcttttctatacttgcatctatatctggcttcttttatctgatattggctttttgcatgtaatttcgttgcatttgtctcttatctgggatttaccagctcatgcttcagcaattgataacctagagcctttctgcacagaaccatttccgcctaagcaagccacctgaggattgttagacattgcaatcttcattagattcggatatcttggtgcccaagtgtccgccacccgcttatcccacctccgtggcctaatcccggcataaccacgagctgacaaaccccgctccttgaaacaagtggacatcccgaggtcacttgcactaccggcacaacttggataacatcacagaaggagaggacttcaaatattagggcactcctactgcacatatggctaccttacacgatgccctccaatgcctcaaaccgacgtcatgggacgaagtcccccaggatcccgacgagctccgtgactacttgcgcgcgatcttcaaaaacagccgcctgatagcggagtcacttccagaccctccaatctccgataatcacgactacccaggattagacgacacaccgaattcctccgaccgacgaatagtcccatcacccgcacgagtggaagagaccgattcggaaattacagacctgcaaaaggaatgggggaagccgctcaagatgggcggaccgaaggacaacccgttagacgtgactgtgtggaaactttccgcaaatgacggcgggggctcatggttcgggcgacggagtgtgcatgagggcatgccattctcacgatggcggaagaagctttcatctgagtacgatgaaacgctcaaagtaaaccgcagaaagattgagagggggcacacgcctgacaagagcattcgcgggatcggcgccgaaggaaagatggatactattgaggtcaaggatcatgatggttcggttctgggccatttagttgtttaccatgtatcggcgcagtttcccaaacctacttctccccgcgattttgtggaattgatcatcaattccgattctggattgcaaattggcggaactaagcagccaggtcgcagctggatgatgatctctaagccgtgtgaacaccccggtatcccgcataaacagggatacactcgcggacagtatgagtctgtcgagctcattcgggagattcctaagaagcacagcagtgggagcagctcttctagccaggggagtaagaagaatagtgattctgcgtcctccaattcgcaacgccctgtggggctacctgggcaggatggagctggggatgaggaacatgaagaaatgaatcctgttgaatggatcatggtcagcaggagtgatccgggcgggaacatcccgcggtggatggtggacaagggaacaccacgaagcgtggggacagacgccgctaaattcgtcaattgggctcttcaagatgacaagccgcccaagcgaggagaaatcacaggaacggaagctgcagatactttatcaggcgtcaaggctaaacccggggagtctgtgaatgaatacgactccgaccaggaagatgactcggattcggattacgaatcactcgacagcgactccgaccagtcccatcatggtctgattgctagtgtcactggcttgctcaatactggactggaacggttcgcgccacaagttctaggctatggcgcccccactagggtatcgggtgatctaccagccgagaatgaggtttcctacattgatgcagatggaatgagacatctacgtccagaaattgcccaacaaaataaatcagcgttggacgccgaatcttcaagatcccaagagcaagacgatgtttcattatcctcggccaattccgaaaaagcagcaactgccgtcgaggacgtaacgaataacatgtccccggaggaactgatccaaatgacaaagaatggcaagctcagttccaacgagaaggagctcgcaaagctagccattcgcaaacgcaaggttgaaagcaagctagaggaagtccgcgccgaaatcgacaaattccaaatctcatcgcaaccgcctagtgtctcagggaccccagtaaaaggcatcagcgaggcagatggtgacactaccggaatgcgcaagcgcgcagcgacgaataggtcttccaggcctgccagcactcgcacacagcagagccaaggccaaccgcagagcgagatcagcaatgaagaccaaccatctcctgggcggatggcaacccccgacccgtcgcatctccccaaagcagccacccactatgtccacggagaatctaagctgcttaagcagctgcgcaagatcgaggctaaccaactgaaggttgcgtcgaagattcaagcaaggcagcaaaaggatgaggagcgctcggagaagtctaagtccaaaaacaagtccgaggttgataccttgaagcaggaggtacataatctcaagaaagaggtcaagcagcttcgctctgagcgccagaaatgggtcgatcttgtttcttcgttgcaggcggagaatacgaagttggcggcaaagtcggaggttgcttaattggtggatgaccataattctatggcttgtacatactacattgttttcttttttcttgttttgattttgacgggagggtctgacatgtcctatgattttataacgacatactttgtcctatgtcttttactgcatatttctacggaatgaaagttggaattggatatcttcatgtctcaatacattatcgtcatgatgatttgattatgatattgcagaccatgatagatcaagtgaagatacggctctggggctgttttccctatgcattgggtgcagttgagtaatctgatgctcttcaagcaattccaggccatctacaggccatggtgctagttgggtagttcagaacttgctgataacttcatgtggtaggcagggtatatcacaagttgtccgctcactgacaagaattgaaagattctcgaggttccagaatacgggcaaacactcggggataccaactgccagaaatagggatacgacggccttgttcgtttagagcgtttcatatgttgagttggaattgttattcctaccgaaggaatcgaggggtggtcggaatatcgggggatctgtatggaaatccgaggacgcgacaaggggtatcaaggaaaacaagaataagccacacttagtaggtttactcttgagtctaatcattggagagcacttgttagccaacccatccttgtatatgctgagcaactccgcaagatgccacatacctctggcggattaccagcgcctctaaccattttctccagcatcattgcgcgcaccttctcttttggttcgcccatgccgactgccatgtaggatagcagaggagggtgaccaacgtaggaggagtagctgtcacggaggatgttggatgtccattcgtacttggtggtgtcggcgtgtccggtaccgatgtaacgggcctggagagcctcaaggttctggatggtacggagcttgtcggccatggtggagaatagagatgttgacgttggactgagaaggatcgcgggaaacttgaaaggacgacaaaagatagaagggaactaattatgcctcaggcatatattatatgggtaacacgtgactgtgtgggcatcttgggattcttcaatcctgtctttgccttcaacaaagcctttggttgtttagaaaattgctactcggactgtgaccatatccaatgtctgtggacacatctagttcatcattaccgtcccggatagcatcgctggttcatgcacatttcgatgctctgccaacacgcagtaagccaaccatatttccggatggatcgagagaatggattccaatgactggtattgtagctgtcaaaggtatgctccattacttaacatgaccaggttatcatccctcatccatgcatgtaatgtgaaggggatgggtccatcatttgctttttacttcatcctcacaacacttgatgttctatagtaacgtttttgtctcttcccttataggagaaaacacacattctgaaagtctgacctgcatatctgtcacgtaagttttgaattccccacttgcaagtctgacccatattcactgatattcatgtaggagtggcgcaaaatgcttgtcagcatctcacatcccacgctgtaggggtcttgtactacatgactgtcacgccgagatattggccatccgagcattcaattattggctcttgacagaatgcaacagtgtcctatttcgggagaagcaattaccgaatggccatgatacttgtaccctcgataatgagaaaatctcagattccccatttatacaaaggagagagattgaagaggatgaagataatactagtacaccgcccacagaatggccgccttttaagcttcggcctgatatcaagatttacatgtattgcacatgtgctccctgcggcgatgcgagcatggagctctgcatggcagctcaagaagacgctacaccgtgggagatttcacagcaagaagcctctttgtcagaaatccaagacgcagagctcccagatacagagacccttctagatggccgggcccatttctctcttctcggggtcgtacgtcgaaagccagcacgaatggacgccgagtccacacgcagcaagtcctgctcagacaagcttgcattacggcaggtttcctccttgctgtcctgtgagaccagtcgcctcattgctcctacagaaaacgcctatctagcaggtctgattcttcctgaggacgaaataagccaagttggctgtgcccgttcctttggcgagaatggccgaatgcagcctttgggtgggcgatattggcctagaggggcaaatttcaaagaaagcacaccaggatatcgattccggccattccaggttctttcggtgccgagtgaagaggtgacagcactttggcgtttcgctaagcccaaatccgggcctcttcctgcagcttctgtggagcagcaaggagacccttcgagccccggtacaaatgttaggaagaccaggccagggaatgtgagcgccatttgggtattggctccctcgtatcatcacccattggtaatgaccatggataccggcagcaagtcagtgccaactctttgccgttccaagactggtttgtatgagactatcatcaacggtgtgaagcaaggaaaccgggcatcctcacctggtgcccgtggagcctcttctctatcccgagccaagctttggtctctatttcgcgaaattgggcctacatccgttccacgcacctatacaactgatgtctccccagccggaccgttattggggactgaagattctcatatcaaggcagttcaacaacacatgccagatataaccacctaccaggatttcaaaaatcctaccagattaggagacccgttgcaaatccgtatgcaggccatcagggatgcgaaagtggttctcaagggatggattcctaatgcaggagatgaatcttggggcttggatgttttggttgaccccaaaaagcgaaagcgttgattgtgtccagggatgaaagagtgctaaagattactctaggccatacatagtaaacctatcgtattcccctctcaagatacccatatatcgtttctaaacaaaaaaaagccatatgtttaaaaaacttcttgctatcagagagaaaataagaggactggtttgtaccgttcttgattggcagccaaaggcgtcaaacaaaaaaccgcgatctaatcaatcagggtgtcaatgagtccaagagaatgtcaacaatgggatgtctcagggtttttctcacacctttgattgtttgttcttgttcttctcaccactatctttcttctcccatgctttctgatcccagtctcaccaacccacgacttcacaccttagatgtcaactcccatgagcaacattcgatagaggaatccgcttcttcaagagagcactgatttcatactccagctttgtcttcaagatgactccgaaggctctagccgagtgtgcaaaatgtgagacaaaagctaagacaatgtgtttgggctgctcgcatgcacccgaataccaaagcggcgattctcgagttgttttttactgcagccacaagtgtcagataatggactggccaaaacacaaagcctattgcaagaatatgcagcgacggagattactcttccgagctgccctgatattgaaggcagccatgttggcatacagagagactgtatacgacgtggatctaaccaagattgagtatcgagatggagtcctgtatctccatcaaaatcaaagaccggtttcatctctatctaaacgtggtcccttcccaaaccacatcactgacaacatcgaccacaaggaagcggctctcctgaaaagccaatccacagcagccatgtcactcttaggtcccttgaccagaaaactccttggaggtaagaattatttctaactcctaagtacccaagtgagacatggctgaaacaaagcaggggtacccttgaaaatcgagaccatggtcgtcaatatcgggaggccacgggttccaactaggcttgttcctggtcctgacttgtacggcggtccgcacgcggttttgaagatagaacggatggagaggaacgaaacatggattatcgatacaacaggttgtcaatatggattccgagatgtgcttgttccattcgccaagtactttattgacaacgaatgccggatattggacggccctcgggtttacgacgcatgcgagacaaaggagctagactacttgtcaacccttcatatcttcaacaagacaaaagcacaacggcaagatatgcgactagaacggctgacccgtcaccattttgctgtcttcgtttatatgagtgtgcatgataacttccttgtggactctggcgccagctacaagagaaagattgatcgcttcgtcaatgagctcaaaactcacatggttgattctatgaggaaggcaggtgacaattttgaagattctgaagatgattgaagaacaacggaacggttcatactggtacatttgttcaatgagtttcaaactcgcgtctcactttcgatatcaattatgtaaataatttcccctattccctccatccctccctcctctacttggtagttattgccatgggattgacactgaggaataattttaagttgatcggaacgagcaatctatcttattcgagtaattcccgcccggttacatagaccaattcatgcagatattcctttggtggccaactccgattgctcggttaataggaaattccgatatccctggcatgccgaacacagctcacggatcgagtcagaatatcagagatgactccggggattgggatagctagtatcttgctccttatacccttgagagcaggcttgattcggtgggcctattataaaagtaatcgcagataaaagtattggggatcattaatatacaaaaataaggcatagaagtaaatccaaaaacatgtgaaagtagttcttgataaaatctctcagtagattccagggatgatgcgattgcggacgatcgaggtataacgcttccagtcagcgccatacttcttctcgcatttctcctcatcacgcatctcacggtggatcaacaagataccaaagtagagcatgtagaagtatgtgaaaatcataccccagccacggatttctggggtctgcatggattgcttctggacagcgccactggctgggttgatgctctcgatgagaacatatcccgcaacaccagttggtaggcagtaggcccacgacatagtccagtcgcccaggtagttgatgtgacgcgccagaccccaccagccggagatcatcagtttagatccagcggcagtttcgatgtacttgatgtttttcacgcgggggtcattgggattcgtgcggaaacggttcttctgattgttggcgccgcggaagatcgaatatccaacggctgtgacacctagaacaacagccataccggtcaagccaagctcgtaggggaagacagagagataacggctctggatgctgtacagatggggcacccaaaccacgtcgccaaaagataacatgaatccaaatccgtccatgattacatccatggtggtcatgattgctggctccatgtatagggcatcaagaatgtagaatccctggaaaagagtgaccagcacaattgagtcagtgatatagccataggttcggtattggtgggctacattggacaggttcagaattgtccatccaagcaagcccggtctcatctccatgaacaccttaatatcgacagtacgcgatgcctcactgacaaacggaatgggcaggcgaacacgagggttgagttcacgtccaatgaagaagtcgtagagcatgttgcccgtatggccaccaggtgccagctctcgtagatttgggtttgcctgccctggggctggaactgtgaagctcctcacgtagacgaacagtgcagcaaaagaagagatcaacaagtttgctgtaatgacctggacatagttgtcccatagaaatgtccacaccacaaagtcggctccatagagataagtgcccccggtgaggcccgagaggataatgatggcagaggagaacgctacaaatgagccgagtcagaaaaaaaaacttcaatgttttgaatgcgatgtgtgagggaggactgctgccaatgccataccattgaatttatacttcagttgtcctctgcaggccaacacaacaccatctgcctcctgaccgggaaggaagacctgcaagaacagactgaagacatagtagctcagtgtccacagtgtaacattggtatcataaagcgccgtgattccctcctccggccaacccacttcacgcttcaattgttcgagtgacaaagtcgagggattcagtagcgatggtgcgggacaaccagagacatcgttgcagacgaaggtaaagaggtagatcaggatgggcaatccaaatataataccaaaagcacctagtctattgcaaatgtcagctcagcttaacgcgattgaaagggaaaagacatacggtccaccaaactcataaccacgtttctccggcactggctgcacgggtgtttttatggagtcctttttggtaggcatattgaagtgatgactgggccaatggatagacagagaaataatccaagagctggggaagatccttaaataagacccgggagccttaaggcgcgtacgacatcggatggttggtgttccgccaggtttgctccgcatcgcccccacagcggtgatgctacgtaagcctctatctctatcagcccggcgttacctgcacgcatacaacctacctccttcgcaccgatccattaaggtcatttctatcattttgcaggttatatatctttctctagtctctccacattctttactttattccatttcatctcgttctattctcagactgccttaggcttgggtgaccagtccaccatgaggctcactagctccgctcattactccattttccttctatcctcaattctcggattatctagcgcatcatactcttcccattttgaagatgacgctccctgtgttgcccgctcgccgaccactggattgtacttcgacctcaatgcgatctcattatccccgcccaaaatgaaggacggaaacaaactcgcgaaggatgcgcggaccgagagctggtatgccaggggtcatgattacccggctaatttcacaatcaacatatgcgcgccggtcattgagaacgtgacggatgtggtcgggatagagtcatcgcggtggaagaacgtcagtgcatattacgagcgggatgataaaagatactccatagggtatggcagatctctatctaaaccggttacactggttgtattccctgcttactgtgctaacgattctcggtcatatacaggcaacaggcatctgaacctttcttccgtggccgcaaactcgttctcaattataccaatggctcgccttgtccggacaattataacacgggcagttccaatgcctccacacgcaataagtcgactatcatgtctttcctatgtgaccgcgacgctgcgccaaacgtggccacggcttccttcgttggctccatggatgagtgctcatacttcttcgaagtccgtagctcggcggcatgtggtggaatcgccgtagatcccaacgccggcggcttgggaccgggcggcgtattcggtgtgatgtgagcaccccttctgcgtcttgggggaacaccccatataatccatgctgaccctgtcctctagtatggtgatcgccatcgccgtatatctgattggtggctgcgcctaccagcgaacggtcatgcatcaacgtggctggcgccagtgtccaaacttcagcctgtgggctggctttttcgactttgtcaaagtaagtatcctagcattgatcccatgttggcctcgtcgcaaattcagacatggcaagttcgtgtcgcataagtttcgggattcaaatggggcaggactacctgtttcaaggatggattgaagtcgctctggctagtctagggaccaatcccttcgggaaagacggttgcggttggcctgtcccatccatttccttatttcttgtcaggcatagatcattcttttttttacctgcatgttctttcctttgattctgaccgcctgtgttgatcacggcgtctacatttccatatgtttgacaagatgtcttgattcatgcaagtggattgtcccttgggtacttgtcaatgaatctgccacttcatcttcgggatggtaggagacagctcctcttacttggttagacggactatatgttttattgcgtgtacttaaatgattggtttcaattgcgagcctcgttgtttgaaacatgacactgaccacttctttctttctgcaccaacaggacatgttcgtgattctcttttcgtcgctaggtaacctcttccgttgcagggggtccgccgcaggcaatggctacacccgcgcggactcggacggccgtggcggtttcatcggcgccatcggaggacgtggggggcgtgggggacgcggtcaggggcgtgacgtggatgccgagaacaggctcatagatcaactggatgaagagtgggatgattagtcgagggttgcttttactttatcttctctgctttcctatacactttccttgcctttttcgtctggcagctattgccacttttgttcctcagctctttcaaacaatagatttcgaggccttcgcccttgtctttttatctgtgatgcaaataattcccgtgttatcatattttgtaagcgtttacatacctctcgaggtcggtggaatatatattcacattcaagactctgtgtaccatatcaattcacacattgcctacagacttgttcaaatgtgagcagaattgagattaaattctaaatgaacttatccaatcacatctatcaaattcaattacgcatacctactttaactatttgatcttactttcaatgtgaattatagtcgtgagtctaagcaaacatagttactacagtgaagaacaaatcatacaactagcatcattggtctagtggtagaattcgtcgttgccatcgacgaggcccgtgttcgattcacggatgatgcacaacatttacttttttgtatctcatttgcaggattttatttggcagaggaaaaagattctaattgcttttttttttatttctttagatcactggagtcattcggaaagttgtaatgtctaaccaagaagaccgagccattagacttatattattcggaacatctgccccaaaaaagggatataaatgccgtagacaagacaataatatttacacaaatcaacacaaatggggtaatatgaatagcagcgcgaaaagtaacaaaccccagccctaaaagtccgactccaaccctttgaaatcatcgtaaagaaaagtgaaacaccacgtagcagtcgtcgagaaagcattagctgatggatagtatatgatccgatcatggccgtgagactttcatattcgaaccagtcaaaccaaggtcatatgcgcttaaaggcatgccaccagcacccctgaagccatacatatctacagaagggagcccgggcgtgccgccactattaactaccccaggcatgggagctggggatggagcttgtgatggttggtttccaccgccaacagggtcaagattgaaaggcaggaaccacgcgctgggctggtagaactcgcccattccagcaggggcacttgggtccagatggcccgtgaacagtgtttgatctggacttggtgtttggacgccattgagtggtgggataggagggttgtttgggacaaatgagctggggtcgaattcggaaaatgaaccatagacgaattgccggtctagctgcggtaattggtctggtgggataccgaagtcgaatggcggttggccgaacgacattggtcgggattgttggagcatggatggctgtgggaatgcgctgcctggaacactcggggtatttccgatggttacttccatcattgatggtgatgaagactgttccatgcctgaagctccatcggatagtttgctgttcttccgagaccgcgatttgcgcggttggcttggctgtggagtaggggaaaggccggcaaagaaatcctccacgctctggaggtcaggtttctggcccataactgcgtcttcgcccgtttctttgtgccgggtatcggggtcctcccaatgcactcttgacactccatggggatacttatcgaaccagtcaccatattggaacatgggcgttagcgatgcaccattctgagttgccacagagcccttgatagctgcatcggcgaactgccgataccgatccttggcactctcaaccatatagtgaaacatgccccaatactttttcattttattgagatagcggtacgtatgccgtaggttctcttttgaccgtgcctctagctgaacgttcttcgagaatatcccccagatgtggactgtacttgccgagtaagcacagtatccagcaaaaggaacagtgagggggtaggctgaagcccgatcaaaaagcactgaaatgtgatgcgccgcttccaccgcggctcgacctgcattactgaggaaggactttggcatatctcttggtggacgcccccccggggacaagggaatggcgaactggttgagaaacagcatgttttggtgtatgataatgtggaggaaaatgaattgatttgcaatcttctccgctgcatggatttgaagatgctcgtaggtgaaggtaaaaggcgccggaagagacgcggagaactcctcaatttgccgcttaagctgcatgtaccctgactctggatgccaaagtggatgtaagtccttactctttccacctagattcaggtagtcgacaatgcgcccccaaatgacgatagcgcggataatgtacgctgaaacacccatgttttctttagcgttagataattggccggcatcgtcaggtacaggattaagaatatcgccatcaagatcttccgtcggaccaggtatctccatctggaagtggggttccttgataggaagctgtatttgtaggaacttctcattcccaataggtggccgttggcttccggaagagttataccgatccatcaagtaacatgcccacatagtccggcgccgaatttcttgatctgtgaagctcaactttgagctgttgccattgttctgactgggtaatggatcctgatcaagctcctgatggagctgcaacgcgtatgccatccgtaatgcttgacctccaaaagaccaacttcgcccaccatgacatgtcccaaactcatgaagaccaagaagtaagaaaaccgtaagaattgtaatgttcggctcgtcatgccggctcagagcgaaggccgctgcaggattagcccagttttctccacgtaagaatggcggatctgagttcagctgaggatgtgtggagaatcgcgcagatacggcacagacagcaagaattaggacagggggaattgtgcctgctttgagccgtcgcataaagctgggtttgtgtaataagaggtatgactgcccatagacacaatcaaaaaatacctccgcaagatgctcttgaatctccagtgagggcagaaactcagctccttcgataagaagcccagtcccatcggtggatttaggttcacgattcattgggaacgtctcgtgtggtgggcggctgtgcccacgagtccattcatccatctctgccgaaaatgcctcatctgcggttcgtttcttctgtgcctttgacggctgagccgaggcggaaggtctgacaaccgatcttccaatagaaagcatatcccttgtctcctccttaggtattgtcttgattacgcgatcttccatcctcttcagtcgcttgtccagcatagccatataatccgtgcgcggcgccgccttccgcgtagtaactttataaacacacggaatcctcgagcgcgtacaatgcttgcaggcaggcttctcgcccgagcagcggattttcttgcggcggcatgcgatgcatgccagtggcaggcgcttccgctccttccccgccttggtcttcatctcgctccaagccggtttatcgtcgtcgtttagatgttcaaaattggacgggccgttgccggagtcgtctcgcccgttgtctgggcctagcgcggggtcgacggtttgtgtgctaccagggtcacgggaacttgcatggctttgggtatcgaaatcctcgagagctgctgccgcctcctcctggcctacatcaaagcggacaccaggggttttcgatggcaattcgtcgggagcgggttggatcatgacgggtgcggataccccaggacccaagcccgaagcatccttcggcacggtcggggaaaaaagaaggcgcttccgaaatggagcgcgaggtcgttccggggaagatcaatttggagtggaatttgaagagcggggaagaaggagaggcgaaatggaggagaaagtgaaatcagccccgaatatggggaaaaggttcagcggcgaatggtggcttggcaaataattacaattcggccactggcggcgctgatattacgagactcgaccacaatctttctatattggagtataaagaatcaatgaagtctgctgtagctcattgaaaacacttgaaacagggaaagtacatacgcaatcgacttgaggttattggattcggaggcgccccaaccctatatccccctttaactcctatattattcccctatagttctacgtctgggaatatatttgcaatctaattccacttgagccacgcatattaaaaatggccccagactcataataccaccttcatggatatactcgcagtatgcctggctctctcaggacggaccgggacagccggattggcatacgggctgacacatcggaagcttgatagaagactaggactagcgtgcagctacatgccaggggatccttattgagtggccaacataataagatagttattcattgatcatctcgagtgcattacagaagcaggaccccttttttttctcttagactagccatcgatcggtaaatgccacctaccgatagataggccaaagtcgtctggtttttttctctcaagagtcgctagcgtcatttcacgtgtcgcatttctgtacgcaggctattctctagtttgcgcgactgatcctaggtggatttcgggcgtccaaccttatggcgtggtgttgcgagctcaagcgagttcagaatctcggccccgagaacatagatattgtagctgggaaacacgagccacagcccactgaatgatattagtgttatatttcatgtaaacatgcactagacggagctcacttagggaggatccagtagaggaacagagtaagcgggtcgttgtgaccgatgttctcgaagccagagaagatctcgttgagccctattttgttttgtgttataatccgacacacaaagcccaggaaatagatatagcttacagtaaaggatggtcttgctcagggtcatgacagacgcggtgtaggcgaccagaagtgcggtcgcaccaatgcgcccagcgacgaccttgtcccccttcagcaaccaggtgaattccttggagatattctgcgatctgccacctctcccaaccgtcgatccatagtggtagacaatccagaggtaatagatgtaaccgatagtctcgaggacgttgagcatagtctgtgcagccgtgaagccattatgcgcattgaaggctggccagccatagatatagtccacttttccgtacagcgcgtaaggcgtccagatgggagagtgtagacttccaccgggcatgctatgtggtcgcaacaagacatagcctgtgtcccatattaccaagggaaccgaaacaatgagccagattgtcagcgcagcagcgggcgtatgggtccatttgcgcgaattggcgctggtggtagctgggggtaacttggctagctctttcccgacctcgggggaggggaattcgcggggatggtgtcgcgtggagaccatgatggaaggggttgcaatgaataatgtgagtaggacagagtcgaatgcaatcctaataaaatttactatgagagggggaaaagttcaggtagaaaccagtcaggcgcagaggaatgccgggggttacagctcaggcgcgactgacggccaatgacgtcgagggtgatcgtttgccatttttcacccgacggctacttgcctctcgctctcacttttgtatgcggttgaattggaaatctgactgcagattttggaaattagcgtgaatttcgttgggtacgtatatgagcgtgtcacatatatacattacatatgttattgacgcaaatcaacacacatcgacagtttacggtaccacgagctaacttttggcatttagtattagtaccctggaataactggttaactaattagctctgaatccgtttaggtcatcggatcgtaaactagttatcaaactcgggaagctgccacctatcgtctattctttcacatctctactcatccaacgtttcaggtttatcaagttaccaaattatttcaaatgatcaaactacacgccatcggtcgtggcgcctgcggcactgtatgggcatgcgaaacaggacccgcatacaaaagggaggacggtaacccagcacgatccctccaaaacgacttcgaaatgcacaatcgagtacttcaaagtcgacaaacccttatgaacccgaggaagtcgactcaagttgaaatacaaataccatcctgtcacaactttatcgagccaaagaacaaggagtggtgggctgcacatctagaaagggttccacaaggctatacatcatgcaatatgatcggagcaccaacgcattccaccctttgggggatcaacccgacaccttcttattcaagcattctacccggatgagatcaaacaaattattatcgagagtgagccggatcgagactgcttaattcgactatatttaggcaggcgtcgaacacatatccaggattcgaaaaccttctcacagttccgagcattctctttgcgaaattacccgctacatgaagaccaactagaagagctggcgatcacaacagacgatcttcaacaatatgcccgaacaatggcagaagcactcgctatgatgcactggattgctggcatagatgctaatgatgttgagtttgtcctcgcaatctacaatgataacgatggtggtcgcatcaataatgttttgggaaggcatagcatgtggatgctagacttcgatctatgtagaaatatgacaatgggcgagaatggtgttgcaaaagccgtgaaggccttctagagaaacgatcctttctatcctcgtccgggaaatgccctatgggacacattccgagagaaatacatttatataccagtgatgagtgcctggagctttgtggcgttgaagaaagggaaaagcggcgattcctgtcgaggttgtttattgaacaagtggaagcctggggcaccaatgccaactcttgaaagtctgtggcagcctgaataatttatctgtggacccagaggcaaaaatgtagggcaagcatcatagcttgagacactcaatagtaccacacactgcacaaagagaatcgtaggaagattaaatatgtagttcacgtgacttcaagaaatgtccacgtgactgctaaacagcagccataaaaactaggcaacgacgtgaaacatcatttcggaggtgatttcggagatttcccgaactcgaaattcaaaggagggactgtcaaactgcccactactcattctaatgtgtgctttgtatgtcaagtttaactgataggaagctcggtcatgctccacacttcggagtcagcaactgatggattcaaccaaagaacagaaggtcagtcacatccgttttgagtagatgcggtcaatctaactagcatagaagaatgtgcgactcgcacgggtgcgtgaaaaccagcgcaagagtcgagcccggaagctggagtacgtgaatgagttagagcagcgtcttgcggtgtgtaaagaacaagcccgccaaaaagacatcgagcaccgactagcaacgcaaaatgtcgaagctgaaaatcggcatttgagaactcttttgggatcgctgggagtttcgagtgcttatgtccagcagtatctgcaggaagcggatacgggagtaaacaccaaccggaaggttgctatccccgccattcagcgagtagagagagataatcctctatctctatcgcttcgtgatactcgcagatcaaatttgtcgatggcagtaccgcgcgtttacaaagaggaatcaaagacgactgaactaccaacagcggttagtagtacgtgtgccttgacagtggtgcaacgaacagatcagccgtcaaagcaaaacccccaagaagaagatccggctttgtgtggatgccgctccgagagacagaatccggaaacggtatctgacgaagatgtgctcaattcgacgctgtgtgccattgcagaagaaatgatcaatcaatacaacaccaaaggaattgatgtcgatgagatccgacgaagaatttggtctgggttccgagcaggtgcaaatggcacaggctgcagagtccagaatcacattctgttccaagtgctagacgatatcagcagtgatgtctgactttggcattgacctggcttccacagtcatttgggatattagtatttgagtgaaactgctagttgcagctgcagctgtctttgaatttggccaaaggcacgaggatggagatcacagtttctactaagaatcgcttgcaatcatgtcatcttgtcatctggaggagtgagccttgagtataacaaaaccggtctagaacccaccaacgcctactaaaccaattgctctgttccgcactcctcggccccataccctgaatgcgacgcattctatgcctcaaaattataccaatatgtgggaccactctacaccgacaagcccatgcaggatatttctccggtccaatccaccccacccccagatccagatgaaatgggcaacagtaccccgacttgcagatctgaatgagagatggataataacccatagccatcgcattagctatgccgatgatgcaaatgtgtttcatattttccgatgtagcatcccaggccacaaatagcagctgaattaatgagcaccacctatccaaaaagaattccagtcagaaagcacaagaacaagcccatcacgctaatagtaccccgcaaaccattcgctcctgcacgagcccccagactgctgaacacccaaccggcaaaagccctggaactcaacaatattgagccggaacattgataattagccggtaacaccgatgattagccgcaaatcaggaaaagataactgcttggcggtgcattccgtgagggatcagcgttgttcctcataagtttttctaattgcgggcagtagagttctgggatagtcagacttacatagagaggtgttggagcatccctaagtcaatgcggggtccgatctccacggcagcaaaaaagcctagctacggatggagcagtccttgttgtgccacaaagatgtttgtgtaggaaatagacaatgcatttatgttagagcgaaacatacagcatgctgtcttgaagccgaacagaaatgcacggaacacttttgtaataggattgttagcattgttagcattgagaattgagaattgagttcaggtgtgcttccccacactctctcgaagtaacgtaataagaagggtttccccatccggcaggacgagcggtgatcagttggacgtgagaagatggctagatcagattagaatattgaaagtcatctccgtatatttatttgatcaggtaagagtggtgaggtatctgccacggaatggttaggaatttaggatagccgacattatgtgtactccatagttctactctgtataccaccacagcataagaagctgaattccaagaagaattaccaacgacttttttgcttgttcaatatataacgaataattagaattagaattagcggggaagaggcgcgggcgcggtgttacgatcgtcacgacgtcgacgtgagacgccgatatttcgccgtcgtatacggaatcgaagcaaggcgatggattcggaaatcaatggctctagaagtgtactccgtatgctgtgtcgtgtaaaacggagtggctgggtaattctggtgatgtacttgggaaaggggttgacttctcaccctgcgtttctccttgtctcgaccagccacaatttgtaccttgtgtcccctttcaaggatgagtgtctctccaacttcaatgagactacggagtacatactccataagaataagtcatatccaatgataggacacgatataatgtgattagtgggatagtgcatattttgtcgatccttttctccatttttattatttttgttgatctcatttgatctcattttatggagtagatatatacgctatgcattctattatagcccctgtgagtaatcaggaaacagaacatttaagatcccagtcttcccctccgagatctgtggcttgttccttcctcacgccctcttctttcaatacttgtgccctgtgagatcctatccagcgctttcacagtaatgaagctcgcgtggtttgaggtagccgccttgtcggcctcggtgaccagtgccagtgtgagtccaatttaaacggttgacaatatcactgctaaccaagtcacatgaaaatagtccctggcctattctcctccatactatccctccccatggatgactggcgagggcgagtggtccgaagcatacacccgagccgtcgagtttgtctcaaacctgacactggccgaaaaagtcaacttgacaaccggtactggctgggagcaagaacgatgtgttggtgagaccggtagtattccccgacttggcatgtggggaatgtgtatgcaggactctccattgggtgttcgctctagtaagcttgccagttccaaataagcttgtcgttgcagttaactaatgagactggaacaggtgattacacctctggtttcccctctggtgtcaatgttgccgcagcatgggacaagcgacttgcctaccagcgcggtgtggcaatgggagaagagcaccgtgacaaaggtgtggatgtgcaactgggtcctgttgctggccctctagggaagaaccctgatggcggtcgtaactgggaggggttctcgcctgatcccgttttgactggtgtgatgatggccgaaaccatcaagggtatgcaggatgccggtatcattgcttgtgctaagcacttcattggaaatgaacaggaacactttcgtcagcccggcgaggctcagggattcgggtacaacatcagccagagtatgagctcaaacattgacgacaagactatgcacgagttgtacctctggcccttcgtggactccatccgtgctggtgttggctctgtcatgtgttcctacaatcagatcaataacagctacagttgcgcaaacagctactccctcaataagttgctcaagggcgagcttggcttccagggatttgttatgagcgactggggtgcacaccacagcggtgtcgaatctgctctggccggtctcgatatgtctatgcccggtgatgtaattctcggtagcccttactcctactgggcaaccaacttaaccatctccgttttaaacggtaccgtccccgaatggcgcctcgatgacatggctgtccggataatgtctgcttactacaaggttggacgtgaccgcttccgcactcctcccaacttcagctcctggacccgtgatgagtacaacttcgagcactctatggtaagcgagggctggggcaaggtcaacgagcacgtaaatgtccagcgtgaccatgcccagatcatccgcaagattggctctgacagcattgttctgcttaagaacaaggctggtgcactgccccttacccatgatgagagattcatcggcattataggagaagacgcaggctccaatgcctatggcgccaatggctgcagcgaccgtggttgtgacaacggaactttggccatgggctggggtagtggaaccgccaactttccttacctgattacacccgagcaagccatccaaaatgaagtcctggaatacagtaacggacagaccaacgtcttcgctgtgactgataactgggccctcacggagatggccgcccttgcctcccaggctgatgttgccctggttttcgtgaacgccgacgctggtgagggatacatcagcgttgacggcaacgagggtgaccgcaagaacctgacgctctggaagaacggagaggagatcatcaaagctgctagtcagcactgcaacaacactatcgtcgtgattcacagtacatccgctgttctgattagcgattggtatgacaatgtcaacattaccgccattgtttgggctggcttgccaggccaggagagcggtcggagcttggtggacgtattgtatggtcgcgtcaaccctggcggtaagactccatttacctggggtaagactcgcaaggactacggccctcctatcctcacggtgcccaataacggtgtcgatgctcctcaggttaatttcgaggatggcgtcttcattgactatcgccgtttcgataaagacaatacggagcccatctacgagttcggttatggtctgagctacacaaattttgccttctccgacctcaaggtcacccctctagcctcatccgaacagcgcgagtacaaggcgacgactggaaagagccaaaaggcccctgttctcggcgaagccggcaaggtcttggataacctgttccccgagggaattacacgcgtccgccagtacctttacccgtggttgaactccaccgacttacgtgcatcgtccggtgatcccgactacggcatggactccaaggactaccttcctgagggtgctaccgatgattctccgcaggaccttcttccctctagcggcagctccggcggcaaccctggtctgttcaaagatctctaccaagtgaccgccactatcactaacaccggctccgtaactggtgacgaggttcctcagttgtatgtctccctcggcggcgatgataacccctcaaaggttttgcgccagtttgaccgagtcaccattgcccctggtcagaccctgcagtggaccaccactctgacccgtcgtgatgtctccaactgggacgttgcctcacagaactgggtgatctccgacgcccagaagaaggtgtatgtcggcaactcatcccgcaagttgccactatcggccgacttgccctcggttgagtaaatgatcttcctttttggaatggaaactggaggataactacacatgtccacatgagtcaattctcttgatgttgtacagccaacattgcgtttttgcacatattctctttttctcaagacatggctcctgtgactacttccatagctaatgaaactcattaatatctcttatgcagttcgttcacagaggcatccaattgctatctgcagaaccatacttcaactcggacgtaaaagccagacatccattcaatctgcctctcaaccatatctctcacaaatttatacaccggtaaacccgtaaaatgcaatccatccgtgtccacgcagcaccaccctccgcaacaccatattcccaaccaaatccgaccgcctcaaaccagctcctaatccatatcaaatcaacaaccataatctgcagcatgctcacatgacccgataaatacaccgaatttacaccatcccagagcacgacttctcaggcacagtagcatcaatctcccaagcttcaacaacaaccctgaaacccgccgtcttcggcatgacctccatagaccgcggctcaacatggtcatcgtatgtgcttgtcacaaccaatgaagtcgcactcaaaccaacaggtctcgggagggaagaggctgcggagttaccgctttgcgcgcagacggcgtacgaggcgctctttttgcatgcgggtcttcaacttccgcttttgggcaggtgtgcgctgacggaaccacagtgttaccaggaacaggatcaccagaatgcttggcagttgggagagcgcgtgcttggtactggcgctgcgggtggtggtggtggtggtgtttttctcgtgcaacttgctgcgcatactgagatgcatgttgttagggcgggtgagtctgttgcgagattgggacgttttgatggagttggggatgaggaggttattgagtatgcggagtttgtgggacgtccaccagggtctgtttgatgttgttgttgatttggtgggtgggtatgtgtcgcagcggtgttggtagtctgtgaatgaggaagttgtcttgatatctgttggtttggcgagcttttgttttgtcgaggttcatacaaagcgtaagttgagaagtaatagagttaaagcgtgatttttttattcttgagggaagtggagaggtcttgcgtgcgcgacggcgagagggaagttgcagtcatttgttgctgccaatttttgcttataattatgttaatggaagggctgatgctcgagggaaggttgtgctttatattttagattcactagatctatgagcattgtagcaattccaaaatcactagagctcgcttaggtagaggttaaatcatcttcccagtataaactttccctggcaagctgtcaaaacgtcttcgcggtgtgcattagagagagatacacccctcaagttcaaggactgttcctcaaaagtcggtatgatagtgcgcaaaaatgccttgaaggaatcataggtgatttcaatgcaataaagattagttagggatttgttgtgaatttgagtgtaagacacgaagggcagcagagcacaatggtcattgctgcatatgtctgacttcttgagtttcctattggaggcaaccgctgcctctagaagagccgaaaaagctatagcatggtacttgtgtatggttttctgaggttcaatccgaatggctcgaaatccaagctgatgtttatcccgcgccggctgaggaacccggcatcattctttgcaattggatttgtatctcgggaaaaagccgagtgcttaagctgcaatcttatgatagtgtgattcttaagcgtatcggatttgattatgttgagatgatctgccactaaagcctgatatgcagtacgctaagcattaatctaggtgacagtattatgtggcctgtctctatgtgaagtggtgcacacttgaagaagtcaaggttcatcttatgaaagccctcgaacaaggatgatacagtccatagctcttggactcgtgttcggaggtcaacccgtttagtatgagaggtctgccgtcacaaattatcttttagtttacaatgcctctttcaaatccatcacacttgcggagacccgattattggtgccagatagcactccagcagaatgtatgaccaggtatcgacctccatcctccgacagcactcgtagagaccgtgtgtagccgtgctcttcgggcgaagtgatctctgtccactctccttcgccaagagctttgttaatgaacaaagtactctgtgtgccagagctggcgataatagtgccatttttaccaccgtatggtgtccacacaacgtaaggcgaagatgccggccgagtaccactcgagacaactagacgctggcctggggcggaggcgattttttcggggtcggacgacagacggtagtatatagggaaggagtagcttgatgtaccgaaaaaagagccatactcatatatgtagaagtattgaccgttcgggagctagaaatgttagaattctccgggtatgacagaaacccatcgtaattgcattggtgtcttgggtttagcttaccttggtcagaactggcatgccgggtcggtcggtatatgtcgggtaggtgacatcctctacaatatctccccagttctttaggtcagttgagacctggtgaaccattgtctgtccgtgtgttgcattatcccgctgatccgagtaataacaaattaacttgcccttactgtgaaaggagttagggagttatttcaaggcagaatataagaacatactgagcaagtaggaatggctcccatacaggagtcagtccattgttcggcagtgcctctcctccggcagcgatatggctaacaaacttccaattcacgccatcatcttgcgacgcgtaaagatcgatgtgcgtggacgacaggtcagttggaatactactaccagctagaagtagagtgcctttttcaaatgaaccgatgcgctcgggcagggagtagaggaatggctggtaacgcaggccatatccgttaacagtgtcatggaccttggagatctcgttccaggtctttccgtggtccttggagcggtatatggggaagtaaaccgccggtggctctggagagtagttttcccatgttgcgagaaggtcaccattaggaagctgctcgttacgtgggtaaagtgttcgtgggacgatgtagtcggagggtggtgagaagatggtcacgtttgtgagcgggacaggagaagattgcttggagcgcgagattgtcactgcagctgtagctgcagcaaaagcaaggacctgtggaattctcatgtttggtacatatgttggaactggtattctatatctccattggcagcattatcctgcttttataaccgcatttcgtaaaaaagaaatacgggttgattttttgagatacatagtatcccggggttatcccaccggaattaaccttattgtggactaattggagtgtatttcatctgaagaatttccgtcaattacggccatcgtagataatccggggaaatatgaaatgacgacatcaattgccaagatatcacgtggcatcacgtgatgaagaacatggggtttccaccattccttcggggctataccccgtcaggatcgggggataacctcgtatcgaccaaaatatactttgaaattcgaacctttgaagtccacgccaattgggcagcacaagcccccaggcagtttggccccatcatccaaagccaaatttagaaatgcccgaaaagttgaccaattatgagtgtggatctacattattccaactacgttgcctatcagcacacagccttacagcatcgccacgttttgctggcaaccaacatacctgaaagtggttgattgggaaaaatcgggctatgtatcatgagaaacttatttaccttggattgcctccatctttctgtcttccagatttcacctttctccaagacatccaagacagaaatatccgtttccaagttacaggtgcatttgtcttaaaatggtacctaccgacttcgcacaccggccaaaagtccagttgatagggaaactgcaacaatcgacgagggacctcatcagtcgttcaacggccatgtgggataattcaaagtatcgctaccatcaatcgataatggaaatcaggcacaaaccagcaaacacaataaataattcgacggataggtgtcaccagtcaactgaattgatgctatatcgaccggtatcaaaacggaatcagtcagcagaccagttacaccgagtcgctcgtgttgaagacacaacacaacaggttggagcacgcgatgggcaaacccaagagcaaacgcccccacaatcacgattttattcacgggcattcaactcgcagtcaacaaactcatctccaaatcccaagaccacgtcacgctccacaaaagtgaaatcaatcaaatctgcctcggtcaccggaccttcactatctctggaggagcagatcggagggttttacaaagcaactatacttgtcaggtccgcggtgaagcaggcaagacagttgcgggatgataaaagagcactcctcggcgagatcgagcttgagtggatcaactcgaccatcaccggtgccgaaactgccgccaatgatttagctgcgtctgtgaagcgattcaaacagagcagcccacagaaccgctgcagttggaagcgtcgtgactacgaggtcaccctggaaaaggaatcccgtgtgcttcttgctcatgacaaagtcaagacggttcttagccatcttggctcactacaactcaccttgggcaaggatgaattatttttctctccatctgaggtttcaatggtcgcttctgcgattttggaacttccatctgagacgactgttctatctgactttgagcttttgcctgtgaaacctgagcgacctataccgaaaatcgtggtgacacaatatgatgacgataatgaatactcccatagctatcaaagttcccctccaagctacgaagcaagtggaatgaatgccatggcagagtttcggtgatcgtaccactgcatggcttccgaacgctgaacaggagcggtgtgattgttctgtaacttatgatggacgatacgacatgaataatggatcaaagttttggctctatagttacattaaattcccagttcgcaagcttcttggcttatgtcgatccaatgcttctgcctggtcaatgaaatctaaataaagccacaccgcaaaaatacacccaaagtggacactgcgaacaacatctaaagacgcgactgagtattaagcgcgttgatctcctcaatcacagtgtcgactgcctcaaccgccattccgtatccagcctggtaaccggttccaccggcgccatagttatggacaacaaccccccgacgtcctgaagcgcctactttcacgttctccctggcaacgcgagcgccaccctcgcgggatgggcgtagcccagcaaaagcaccaagaatctcagtctcgcttgagtttagagcaggaagcaaagccgttgttcgagtaaggattgattctgactcttctccaaatgtatccggtgtactgttgatatagttcagttgctgtcatatggaacacccgggagaaaatcccaatggactaatgctactgggacaaagggctgaaaggaacctacttacccaacattcttttgcatgaatccaccaaggatcacttttccattcgagtatggtcgaggtatcacgtaggtttcatagtccttaccatgtctcatgatgttttgttgaacatgaggtgcttttgcaagcagaatctgacctctggtgggaaaacactttgagtcttggactcccggtaactctttcgctgcattgccagtgcagttgaataccaccttcgtatccgtgctgatatagccggatgagactttggataactttttgcgaatgactcgcaccccatattcttgggtgagcttctggaacaaataccgaaggtgcattggtgcattgagagttattgttgtgaactctataccaaatgcaacacccgctggcaggtcgtgtgtggcaatctgtttgaactgttcgatggtaatattgataagcatatctagggtaagcaaggaactcatccataactcacatctttgagatactcgaccatagaatcgatcttctcatgggctggaagctcatcccaatactctaccgatggtgtttccttcacaaatgcattcttgccatccttggcagcaagatcgagaagatacatatatccaattttgtcccaccgcaacgcatttgggtcgcttgcagaaatagcagagaaattggcaccagccctgaattcgggttagtcgtttgaatgtgaactggcagcaggagcccaacataccatggtgatgtgtaatttatggaagtatctcctggaagatgttctgcaatgatggttatgtactggctatagcccttttcgcagagaactagggctacatttagcccgatcacgccggcccttacaaaaatcagtatcaacaccccgaaacagtcatgtatgttttggctctcacttacccgatgaccactacagattcgcttttcatattctccggtagatttattgaccttgaatggaatttagtttccttatttgtcccttttccgctccgtttgagagctttaaatactttacaatcacagttctttggattagatggtctgattgatttaaaccgcggcaaagtccgcggtccatcccccgcgggctaattgagggctccgattggcggcatggctagtggggacggatagggactggcggggacaagcggtatcacatatcattggtcaatattattctaacatcgatgagcctcatcacgacggacagtgatttcgacgaccgatggggaatcattatacggctatggaggtaactctgaaaaggaattcgtttgctcgggaaattgattcaattgtgcctagaacccactttcaaagaagagagagagtaaacagagggcaaaataggtaaagtctggcgtgttttctttttccactgtctttcatgagatctttccaattctctcagatatagtaagaagcacaagatctggaattttataaaccactctagtcctacagcagatttctaccgtctatgatgaaatcatctcttctcaaaatatgatcgctcgagtacgactgctatcccaattctaatcggagcctgctaacgtcttcggtcagcgggctggccacccgtagacctcaggcatgtaagctgattgaccgtcccaaaacacaaagtaaatgcaacgttatatcttggcaaccacgtttctatttagtttcattacttgtcgatagctatcgacaaccattctcagtagtatatatcaatttcagataaatcgaaaatttacattattatggtattgaaaattacatcactgaactctagaattatatcacagtcattacacatctttattaggtttcttgaaacttcttcgagtggctagatataaaaaaaaatctcgaggctatagaaaaaaccccatttagaatgtcattgttgatatagttcaatatcaagttgtaatttatctcattcataatttagctactggccagcccggggctagtaacatccccgagctggaacccaggccgcttaggcatcgacttcgggaagacccgtagacgttttcggtgtcaagacccactcactagtcctaggtagcccgatgtaattttagttatatgcccaacatgttccatatctaattagctcacgtctccagggttctccctcttacggtatactcacttcttcttctatacctgtccgttttctccaatggtgcatgttgccgtgcttccacagccaatagaaggactcatctggcgtgaagataagaacttgctaatacccaatattggcaatgatctcatataatggaaattattaaaacaacttcaagacttcaagtatcaaattcaaataggagaaaaaaaatgcctcagggtagatgcggagatacctcggcggtgatatctcggtattctgtcgggtgagaccggttcacaaatttcagacgacccctacttcacatgtcatcatataaaggagcgaaaccgccgcgcaaatacaaatcaaacttgagatcaataaatttacggattgtcaatacatcatgtttcaacatattgatcatatcggttcacaagaatcgatccctagaatgagcaagtcagagtcctcctccgtcgtgaatctcaacgccaccctgcaggagtcacatccttcacctctccagcgcttgaaaaaacattggaaggagataaaaaaggagtggggacctctcatggcggccaaagagagcattgatgacgagtacactttcccaccgggccgttattgtggacaagcgcacagatagcttgacaatggtgagtgttttacagtctgccgcatacatcataaactgatctcatctaatgttgttttgaagaaatatacaggactcaatattcttgccaagatgggaaaggagtggaactttttcgagatagggaaaggccaagtctttcctaatacttcgacgatcgtggccatacaagatatgcgaccttcctactatcaacctggccagttgttttccacaagcatctcaacttcttttctttttttttcatgataccgacgaaccccttcaaaataatggcgcttgctttgcgaaacatagatggggactattttccaacatggcgttacccttctttcggtcacatttcgctagcggacctcttgggatgttgaggatttgactatttccttcaagatagaacgataattcataacttataatattctaattcacatcataagtactgctgtctgcatctatatcttgctgtcgacctcgaatggagctactaagagaatggaaagaaaacagaaaataagagacagaaatgaatcagggtggcaaaaacaaacagaattacatattttcatttcccgctacagcgtatccgaagcgtatcccctagttaacaaactatagttacagtggtgtttcatgtgtatttgaccttgagtacttcggcctgggcccactttgtaggcccacttttaatattgctaggcagaaacctccgaaattcaatccaattcaattagagaataagaaaacagtgcagggcgcgcgaggtttaatatactaatatagtaggcggtctaaaatggcggtcggagcctaaggtgggactcgaagtacccaaggtcaaatactcatgaaacaccactgtacgatgaaagttctttgcctgagtatcgaggcattaatagtggggatgttagtgaactacgcttaactctaaatttagaagcatccatcaaacacaaattctgggatgtgaattttctattcagatcagttaggcactcataggtcctccgggtttctggccgtaaaccacccgcaattttgtgtacaggtgatgcgatgtatctcgcagctccattcgaattcctgccaacagcccttcaatctcggagcgtgtccacccaagcactcttgaaaacaacgcatatgtataaataggcatagcttcaagcatgttgagctgatggtaccgaccaaggtccttgagcttggggtctttaggccatggactctggggcagctattcatcaataagcaagcggttccattttcgttaagagatggcggaacataccttgtagatatcttctttgacattcacaaacccagccttctccatccgcgttttccaggatggggacgatgtcatatccttgccaaacatgcgcgctgattcatgcatgtgcttgatggataagagaaggttggttgcgccaaggtgagttccgtcgtccgaataagtgttgacgtcgaagctcgctatctcaaaccatccattgggattcaggttgctaagtacccgtttgaaaagaaggtcatggtcacggatggaaccttccaattcgcgtccatggatatagtcaaatggtttgctgtacgaccatggttgttcaaagtcgtcaatctcaaagcggcagtttggaggcaccctggacatatatcaatattatatagggaaccaacatagtagcagtggcacataccatgatggctgaatagcacttaggtcaattcctatttcaattagccaaagatttgatcaggatgtaggtagatgctcataccaatcacctcgcagtctggatttgtactatatttcttgttagagggtagactttatatattggagaagaacttgctctgcatattcgattgcccataagcctgttcctgtcccgagatctagcactcgctttggatttttgattggtgcttggaacaattctcctttgaggagcattaggtaaatgtggtggctctgttgctcattaaaatttttgtgtcatcagaatcagcaggtgagaactaaccagatcaagacggtcttgttcccgttcatcatttggctgtttggacattaggctaagacagagagtaatcgttgatagggtcatgtaccaaaatgtattccccttcatgatatgaatgatatctgcgaccgttctgtatctgatcagcacagttcgtgatccgtgatcaagtagcgttgtaacacacttcatatctgcgattattagcaaccattgaacaaatatttcagctacattaacatactgatagtccagcacgctcgatgtgatacttgtggtgtaaccggcattgtcaagtctatcagggtcagtagatatacacaccatcataagtcactggtcttacgaatcagggtatgatgaggcctcggcatcggactaatgatgttagttgaataggaaatagtgcacaaaaaagagaaacactaacgtcaggttcaaccggggtcgatccgtgttgtgtagctcgatgcatcttcaatagtttcggtctataggatagcacgcgaactcagcgaaagcgcgttataagtgatcgaagggatcaggaaaaaagtgaaaagtgaaaattgcaggcacaccgattgcagtcctaggaccccccttatgacccctctgtcttcgatgcagctgttagcgtcccaggttgtcgggtccagcgttaccacgttgtatcccacgatgatttgcaccgtcagccggataagtactcctttgagtaaagagggccgctgtaggacgtacttttttccttagagtacatatccccgtgcaacgtgcaacggctttgaatggcgttagttggataatctaagtggttaaacaacaatctagcgtattgatcgccctaagctgattagctcactcctgtgtgatggtccatagtgctaaaaaggggctgtttctcggccaatcaggggtgtattgcaacgggtggaggcccacaaggtgtaatttgtaccagccacgccccattaggtttggctgatatctactccgtactatgtatactaatccagcaataggtagtttatatacaaattccgttaatcctttgtgtagactcggggttgcaaagtcgaactcctactacaacgaagtccgtgcagtgaccacatcagggttagagtggggcggacaacgtaattgtttgtgagtatcccgtacttttgcccaagtcctcgtattcattgtcagaaaagtgttcaattcgctgctagtaacgcagtacttgacaccgtcagtcccgacaacttggtcgttcgccactaggcagcgtacatatgtgaaggaaagacctcggaactcattccactcatcctccgtgaagatagtcgcctcggcccaggtctcaaatatcttctagagttaagaaattgtgatccgtaactaacgcattgatgttattgctttggggatgcatataaccagtgctctagaactcgaattcttgggttcgaggcactatcacatgctaggtgtgtgatatttatttatataacttgtcggagacaacgagtaatcgcggaaacgcacaaggctacggacccggtacgataaatccaaagtgcagagagactgaactacttttaagtactttttacaggaggcgaagcagctaatcctaagtcgagaccctcaagaaacatatttttgaatgactacggtgcaagtattttatctaatatgtcatgcataaatcatcaatgaaagatatattaattaattcagcccagttctgcatttataagaccatcaacagcaatatctattagatgtattgataaagaacgttctatcaccgagggcaaaaatgatagttttttccttcaaggtatttctccggattttgctgatagaaataatctcgaattcataagttgcctagatgaatgaggcaaatgggtgttcaaatacccagcatcctctatcgactcgaacaaaagtccggcatcctttggcatggtcgcatgttactagtgcaataaagatacttttatgtattgcatcagtggcgctcacccatgtatattacccaacaaggtgatattcgctggacctgactcgtttccccgcatggccctttgttcagggatacaaagccggcctctggaagttgcatgcaatgaggtgaatatccctaaacgattggttggttttgccctaaacatttattgctctcgcgttgctttgattgattccattgcgtggtttcaacatcgagtgtgcctgccaaagaaggaccgaagtggccgtatttcaatttcttactctctaggtgacttcaacgtccattctgtgattactagcttgaaaattaaagcaatcgatcttcttatacagtacaagaatagtaggccacatttgtggcctctgtcgctgagaatgatatgttccagtatactagtcattttacatgttttcctttatatagaaagcttgctctccttaactttcctaagtagacaggcgcaggcagaaaaaggcttagattgtatctatagcctttggcacaagagcgggagatggaaatgaacgagatgtgcacaaaaactatatgcatcgaacctcctattgagtatcgctattgattgctgatgtcaaattactcaagtctcttgcttagaacagcaccgtaccagactgtagcaaccaggctgatcaaattgaccaaacttgagatgccatgcacgcggccgaacttcttgttcagagccagcatctccttggaatggggcgccgggtcgtagctcctctttccatcacgagtttctgcgaaggttagaatattcaattgaatgttacccaagcatggtggcagcagctaacgcaccttgatgcttgcgctcgcgcatcacgttggtggtgatgggacgcaacacgaacatgttcaccaatccggtcactgtcacagttgccagaggcaagagagtgttaaggcggttctcgggtgcagcgagacctgacagacccaatacctgtcccccgtgggaagcggtcaaggcgaccactacaggtagcgcagattgcagtgagaaatatatggggaagatggcagtttgcagattagcaaactgaggccgcggaagggcgcggaaagcaacgaagcctccaacaaaagacttcggatatgtcagacaatgcttttagaggcgacgattcgaccatgcgtccggttcagatattgatctcacctggaagaactgtgtccctagaagggtgccgtagctacctcactcattagcatatgagccatgacgttcgctaataaacaaaccttagaacgtgataggggcgaggatccatgatttcggatatggtatgaccttggggaagttgagttgagttggcgataaagttgatgtgaagtcgcaacgaggggaagaagtggtaattatcgctacgacccaattattaatgaaaccattatttccactgccaatcaagcgtatctgacttctaacgacgcacagaccaccaaaaaccgacaaacacagcgtgtgatgtcatgtgccttcgtgtttcggtctaaaccgcaaatggaaatatcacgcgtctgcctattgtctttgagcctcgagcaattttgacttgccgttttccccaaacaccaccatcaccatcatcatcatggcggagaaagaggctacagtttacatcgtagacatgggacagtctatgggcgagcgccaccacggccgtcctatgacagatctcgaatgggccatgcagtatgtctgggataggatcaccgccacggtatgcgacttggctttgctcaataccaggacactaacaatcctaggtggctaccggccgaaagacggctacggttggcgtggtcggtctcaggacagatggtaagtggtagcctaccagtcagtacccattgggagccttgtctcatgttcggagtagaaaccatcaacagcttggaagaagagaacttctctaatatctctatcctctttgggcttggtcagtatgtgtggtttgatgagttgactgtttcatgtcgggtcccttgactaaatttcctttcagggtcctcatgcctgatatccggaaactccgagagacgatcaaacccagcaatactaacagaggcgatggtatgtgacagatgaaatctcatcaagctgctttttctgacattatacaagccatctcttctattgtcattgccatgcagatgatcattgagtacaccaagaaaaacaaatacaagcgcaagatcgttctggtgaccaatggtaccggtatgatgagtgatgacaatatcgaaggtatcatcgaaaaaatgaaagaagtcaacattgagttggtgatcatgtatgttcctcgtctatatgactccgcattatgctaataccatccagtggtgccgattttgatgacgctgagtatggtgtaaaggaagaagacaaggacagtcgaaaggtattaagccgtcttcaatgtattccaatattcatgttaatcaagttctcctcaggccgaaaacgagactcttctccgaagcctgactgaggactgcgaaggtgtttatggaacgctagaacaagctgtttcggaattggatattccgcgcatcaaagtgactaaaagcatgccatctttcaaaggcaacctcatgctcggcaatcccgaagagtatgacacagctatcactatacctgtggagcgatacttccgaacttatgtcgccaagccaatctcagcaagctcgttcgtgccacgctccagcaccgaacccggaagtcaagcaccggttgaaggcaagggtgaaggtgaaggtgacgctcttagctcagtgcgaacatcacggacatatcagatcacagacgaaaccgccccagggggtaagattgacgttgaacgcgatgacctcgccaaggggtacgagtacggacgtacagcagttcccatcgagcaaactgatgagaatgttgcaaatctacaaacatttgctggtatggggctgatcgggttcgttcagaaggatcaggtgtgtcttcatactaatcccatgtgttataccagctaatcccgtcaactagtatgaccgttacatgcacatgtccaacacgaatattatcattcctcaacgtgcaaatgacaatgcgtctcttgcgttgtcttctctcatccatgcactgtacgagttagagtcctatgcggttgcccgattggtgaccaaagaatccaaaccaccaatgcttgtattgcttgctccatctgttgaagcagactatgagtgcttgattgaagtacagcttccatttgcagaagacgtgcggtcatatcggttcccacctttggataagatcataactgtctctggcaaggtggtaactgaacaccgaaacctcccaagcgcagctttgaaagatgcgatgagtaatttcgtggacagcatggactttattaccactgatgatgatgggtaagtagagttcacttgattgtccagtcaactagctaatcaaaagagccagggaacccaccgacgatctcccaattgacgagtcattctcaccattactgcaccgtatcgaatcagccgtgcgataccgtgctgtccatccctacgatcctgtccttgatccctcagagcgactcacccaattcgcacacccctcggaagagatggccaagaactctaagtcccatctggagaaattgatgtctacggcagatgtcaagaaaggtgaaccctattcttaaaccccatacattcagaagagcccctactcaccaccgaatttcgttctatagttccaccaaagacaaaaggccgtaaacgccaacgcgaaacagagaaacccctctcaggtctggacgtcgacgccctcctcagtctcgaaccaaagcgaacgaaaatttccaccgagaatgcaatcccagagttcaagcaaacgctttcccgagcagaaaacatcgatgcaatccacgacgctgtgcagcaaatggctaagatcattgagacccagattacgcacagtctcggtcactcgaattacgaccgtgttatcgagggcctcggtactatgcgcgaagaactggtggactacgaggaaccagtggtgtataatgactttgtgcgccaattgaagggtaaggtgctgcgggaggagctgggtggggatcggagggagctgtggtggtttgtaaggaaggggaagctcgggcttattgggaaaagtgaggtggatagctcggctgtcgaggaagaagaggcccaagaggtgagctttgatttcttagtggggagtagaacgagtgctaacgctgcatatagtttttcgctaccaattgaacggtcgagtgggtgacaatctatggtctcgatcttggaacacatgaaatagtgcgtatgcgagagatatggaatactcatgatatttttatgccaaatttacccccatgtagatcttgttgcgtccgtgatgttatatagaacgcggttgaagcgaaacaaagttaagagtccacctcagatgactggattcgataatactgaccatctagatcgagggatacaaaattaaaagagtttagggagaaatgggaccactgatggagctcatgcaatattgccatatcgacgtagaattgacacatacaggagcgaaacccgcagacgaaaacatgtggcacgaaatgaatcggtacccaattgcaaggcatctgacgattcgacaacaaaaccaaacgccgcgcacaacatgcccaataataaccagtactcgctcgagaaaacaacaatagaccgagatttgcaaactccaacattaaaagcatccagatgcatcacggaaaaggggtatgcagaagtattgcccggatgggacgagaagaatggaagaagcgcctcgaggaaacttgcacagttccttggggcgaaagaagagagcaggacgtttagtggatggtcttgattgcccgtgcggggctgatggtattgctaccaatacggccactaggcttacgaacaccgcgagactcgctgcgggtgttttccgttgccctgcgagggctggagcgaatcttgctaaccgaaattggggcagcgccgctcttacgggtcacaggagtcttgggtacagagtggtcagcccagttttcctgatccttgtggttgtcttctgcgagggtgtagctggctgtgacggtagcagagtaactgatagaccgtgatgtgggtgaggcaacaggagatctagatgatcgctgggctaatcggcggagctgaatctcttcttcgctctcactgctctcgttgctcttcctgtgactgcgatggctgcgctgctcggtttcaacagcgagagatccggagacagttcgggaataaggatggtgacgcgagtcctttcggtgtgacttgcgaggctggccaggagttggtgcaggaagatcctggtccgggtaagttgcagcttcattgtgatcaatctctccaagggctgcgcgtttggagtgactattgtttggtggggtggagacaaccccgttactagtgcgcttcttagtcgacactcggggagtaacaggtatggactgtgctagcttctcgcgcatgctatcctcaaaccaccattcacggaaggcaccttggttgaggtggagccagtgctgctgaggtccaacgaccataccgggtcgcatgaatctcatgaaggcaattacttcattggcggtgaatccatacttgtagatcaggtaagcgccaatcaagcagcccgtacggcccaagcctgccttgcaatgaactgcgatacccttcttcttggtagttatcatctcatgagccatcttgataaaccgtctgacaagctgcaggggagggcacgtgccatcctcgaaaatcatgtcaatatgggcgattcccattgcggtgaaataagacgggcagtagagctctgagttgagtcgtacaacgagaccgacgttccgctggtggaaatgggccagaacattcttgaatggcatagaaagcttcgaggaagagatttccgagatggttgtgggcaatgcgttgtattcgggggtgctgacaggaatgggtgccacgggctcctgctgaggggatgcaaaggcaaggaaatccggcgtaacccagttgaagtcacccatgtcgactcgctcaaatttctcatacctattgaacaaaatcagtactcaatcttcggcagtataaccagtggcacttactcctcgagattgaagtcgcgaagtccgcaaagagactgctccttagccttccagactccataaacgacatcttgaatattcaaaataaaatctgcctggctgtatccagcatctcggaaaggcatgtaaggggggtctgcctgtgcgatgggtgctaaagccaaatgaggtggccaagattgaatcatgaccatatagcatgcaacaaggcaggccgcattggcgcgactccgggaatcagtcttgctatagaagactactgggcggtcgctgttggctgggtcgccaagaatctcatggaaaagcacggcaaatcggtagaggtgaccaatgtggagtgggccgaaatcagcgtgaaaggcattgtaaagaagggtgtcatcgatagtgaagtagacaggagagcggcgcttgcttggagtggcgggctgggcacgtgctcgcttgcttggggatttaggtgcgccctgatggaagggaaacggggttctggagctgggagcagaatcataagatgcaaggtataggcgatctaggtggtagtttttcttagctctctatactaggtaaaagacattcaaattgtccgaagaacgttgtaccaaccttggatgtactcgatcatctgcccgccgtgattgaagtcggtagtcatattgggggttgtttgttgacagccgcctagatctgcagtgattgtggaacgctggagcgaaggcgaatcaatatggtaccgttgcaggtcctgatgttgttttggggtgactcggaagatggcgaagccaatggtaagaaaatagtcgcggtaaaagtcagacctaaacgttcatgatcaaactgagggaaggagatctatgagcatagaatgttaaggataaagaggaaatgaaagcctggatgcaaaaagcctgtacaggtgaggggattggagaagaaggaaatcaacacaaagtccgagttcatgatgtttggggcagctgccatgccactgttatgttgtgccttacctgtttgggcctagttgcagccgttgacgtgacaacgccttggcctcaggcattcaattgtctgccttccgcattccaaaacatggcaaccacaacaaacaaacaatataaacaccacaaacttcacaaacgtcgcaaacaccacaaacatcaacatcaacatcactcattattagctcacatctcatacatctcatacatctcctctccagttcgtaccccgtcttcagctttgcctcctgattgcacattcccatggcaaattatatgtttggcgagtaattgattcatgtggataaacgagcccaagaacaaagcactcatgcgcccctctacttccatttaggtaacgagggccggtatatcatcctcgtgatggtcactgcggtatcaacctaaaacaaaccatcgcactgaaaggtgatgttcaagccgctgctctctaacactgcctgagattgagtgacctatctggtacagaatatgcagttagggcctccaagctgcattttcttaacacaacatctgctcaatacagcggcttcttgacgaaatttgcttcatgttgaatattctcgatggtgcctatcatgttcaatggttgtgacggtacaacactcgaccagtcatctccgatgatcctgggatcacaatctacctgaatgacgtctactgcattgctttgtttctgtaatagaagacagttgctgaatcaaaaaagaaacttcaaaaaacaacatagatggtcttcggtttccacttccacttccaacatggtgtgcctccacatgccatcaagtaccaagggcagggtggctgctacaatctcggcagaggctgtggctcatgcagattcaatgcaaggacatccctcggacgatgaactgtatttgtttcgaagccaaagtgttccattcacgattcagtacccctgggaatgcggtgatcgacacaaatttggggccccatataatgacccttgcctgagcctaccgtcaatcaatatacacccctcacttgaacttcgagagttccgggtgttgtggtattattcttactctgatggagcaatatttgacttgattccacaagttcgaatagaccatgctgaatctcccacgcaatattctctgtaactatgaggctgtgagatagtcaccccaaatatcctgcaaagaagaacaagcttctacagtttatcagcctgctttatccggcccaaccttgctgaaacttattcatctacaccactaaactaagacctgctactcatcctaactcgaggccatgtaggcacatacatcccttgtttcgcgcaatctccggtgaaatgaaactatctgcgcggctttctaaactgcagcccgttagcgccagtcgtgctaatcaagtaccttaatggacaataccaactacagtcaaaacatcggtcctaataaccccaaatgcgaggggctctcaacaatcgtgcggggcactgccaaaacaaacccagtgaattgtatataacccggcatttccatccaaatgtgtgtcaatttctatacacaagtcattcattcactttcagtcactcttcttctacctgtacacttcctacacaccaattcactcttttcacccgagactccacccacatcgaaacaatgaagttcactggattgaccgtttcaatcatcctttctagcctatgctactccaccgctcttcccgtccatggcaatgtcgagggtaccttttctagcatcgagggtgcggttggtggtgtcacaggctctgctcctaagattgctgcgcccattacctcagccactcacggcctacctggcactctcaagcgtgacgataccgctgccctcggtgggactgtcgagaccatcccaagcctggccaatagcgctgttactgtcgctggcagtgccgttggtaccggtgaaagccttgtctctggtgctgctggtactgccgagaatgcggttgccggctccgctacgaagcgccagctcaacgaccttgttggtagcactttaggaagcgctgttcctgccattatccaagaatccaaagccggtggcctggctcgtgccctcaagcgtgacgataccgccgcacttggcgagaccgtcgagaccatcccaagccttgccaatagcggtattgccatcgctggcagtgccgttggtaccggcgaaagccttgtctctggtgctgccggtaccgcagagaacactgttgggcatacttagtcaactcgatatgcctcatattatgtcgtttcttcccgcatgttggtcatttttcgggatttttcatgattattgatcgatgtttcgtgtacaaagcttcaaggtgtctttggcacttctataactctcaaatgtgttttcttctttgccttattttttccccagaacttaaaaccagtgaaatcgattgagtattaggattttctatgattttctttaggcgttattaggggataaaaataaaaaacaattgacgctttcttcaaaattttcgtttcgcaacagtttttgtctagccgtggtcacccaatacccgaatggggattgtcctgaaaactgacaatctagtcagcgtagttaactgccaagacatcaagaccctccattttccacctttctgtttccccaaaaatcttcagcgctactttacctgttcggaacataagagatgccttacactgacttccatcgaccgcattatgattcgaatccacccaccgtctttgttgactcagatggatcacaggtctatgaatcgccccaccaaggtctactttcccaaatcatctcacgaaacgattcggcagctctgaagtcgtataacgattgtcctcatacctatgtgttctggaaaaattacgaattcgatgaaagcaatccgttacacattgccatctacaacgacaatttcgatattctgcgtgagctcgtacagatctagtccttggatacaagcttgacacagcccttgcaagactacatcaaaagccatcatgtctctcctgttgtagaggcttgtgcaattggtaaccaagagatggtgctctggttgatgaaccataatccctcgtcagggacattggaagatcgggattcagaaggtcacacagcgcttttcagagcagccgagggcctgaaagaagtgggcactatgatgatgcaagcacaagatgaaggaaatgaagcgcttccaagaccaaatctcgatcagcgttgggcgcgtatataaccatttattggttggcttctgaacatgaactgccctatggagatggaagacgaaacgaatgaggaaaatgacaaacaactactaaaggacgaatgcgcctacactaatgttctacctggaactgtactcggtgaagctgtctcctacgcaagctacaatctagtctcacgtcttatttccaaaggagcagatcctcatgcattccagagatggcatggcggcaatagctttgctatagagaaagcggaaaaaacaacaccattacacattgctgcattgtatggaaatgccgaagccatcaaagctttgtttgagcatcgattacctggaaaaatacaaatagggtgtctatcgtcgatgatgagggacgaatcccgctacattgggccgtggcaggaactcacgtggatacaatcgactcttataagatcacgtcgcggatggtagctagtgtcaagttactccttgattccaacccggatacttttcacgctcgaaacaagcttggcgctacagtcttccattacgcagccaaaaacaacacaggtaatggggcaaatattgaggccataagcatacttctggaagctgctcgggattgttcagatatactcaactcgcgaaataattctggggtcagttctcttggagagctaatcgattctcaccaactcattcccagtggtctgacacacatggaagggattaccaggcttctactgaaacacggagctgatgcgcggcgatgtgacgaggctggacgaaatattctgcaaaaattatgcagccttgcttggctggagccaatcagctcgacctttatagaccaattactccagcaacttggtgtcaacgagaaggatgactgtggctgtacagctcttcactatctcgtaaagaacttcgatcaagccgatgctatccgacactttttgagtcacggtacagatgtgaatgcagttgacaaggaagggagtacccccctgcacgaagtgatgaagggtacaatggttcggaaacgggatgaccctactagtcttgagcaacttcctatgcgcctcaagaatgcacaggataagatcattcaaatgctattgacttccgggcatctgaaggaattgtcaacggaaatggagaaacaccgagacaagtacagaagagggttttagaagaacgcgctcaccgattggcggcgcagaaagtcgcctgcggaaggggtcgaggaagagcagttcggtagataggatcgtgtttagtgcaataggctaccagtatgttctcattcacatcagtagtatcaaaattaaatgttccaacacccactttgatgcttgacctacaacgttaatcacaatctaggcgtactaatgtcatcgtttctatctgtgacaggaaccaagcattctttccgatcttccattacctacctcggaataggggtatgagtaatattccgcaatgtcctctggaatactctaggacatacaaacgtagaaatgaaagggttgacgctggaggtgtcatgctgtgtaaacctccatggctgtgcttgccaatcttactattcaattctgtcaagtctgtctctttttcttcttccctttcctcaatatcgcacccttggctttgacatgatgctttcacaatcttcattccctgacatgcctgtacaacccatcattatgaacacacctgattcaatgcaatccacgaccctcatatcactccctggaagaagaagcgaactcgacctgttcgcaaagccaagagttggatcgcggtacaaacgccaagaagtcaatcattctcgacgagttgggcgacgcattgattgaccaattctatatcgccagtctaggggatcgtttggagacacccaatgtatccgttgtcgagcatttgcgcaccagccttcatacagcaccgatttccgatgtcagctcagccagcagcagccacgccttgactgtcgtcgaaagccacgtcgaaattacacctgcaacaagtctagacgaggatgatacgtccctgggatcgcgctttccgcatcctctgccgtgatcgacctttctgaacaaaacggaacagccccccgccaacaagaacgatactgggtaaacgactgcattgggatagggctagcgtggtgcattttattaaggtaagctgctgacttggttaactagttaactagctgctctccaacttttgctcaggcaagcccttaaacttatgtaatactcaggcgcgtgatcagttttagttactcagtgagcaaaaagcggctaggggtaaacaggtcagcactaaagcggaaagggaaagccatgtcgcgcggcctcaaatccggtgtgtacaacatatgttttggatcgatgtcaggtccacctgcatgccttgatcacctacgcatatactagtagtacatagacacacaggtcactgagtcccgccatatatccgatcaaataaatatcacatatattgaatggctgctagtgacatcttaatgcatcttaataaaaatcttgactctccagggctagattgcatccatggattgattacagtcagcaatgatttggaataatgttatgtactgcataaatgtactgcttttgaaccaatcaggtgactcacgaacataaatcaggagacaacccaatcaacaatcggctcggacgacttcctattccgtcggctccttggataccccgtggccagcccagggccaattggtaagaaattgaaccaaccgaggtcaattcattatcaggagaatacaagaagaaagtcatgttcgcgtgttcgcaaatgtctactctatcacattctgccaagtctctccggtcaactttatcaacgacgtcatcccatttatccccgcggacactccagagacacttccctgttaccttccctattttccgtcaaatagcaaccatgtcgtctgctacatcgttcttcgactttgagcctcttgatagtacgtacaattcacgtggtgtaactgccaatattcttccctcatcataccccaaatataagctgcgaagaacctaatcgctaaccaaaccccgcatacgaacagaaaagggcgcaccctttcctctttcctccctgaatggcaaggtcgtgctagttgtcaacacagcctcgaaatgcggattcacgccccagtttgaaggcttggagaaactttaccaggacctgaaggcccagtaccccgatgacttcaccgtcctcggattcccgtgcaaccagttcggcagccaggatcccggctcggacgatgagatccagtctttctgtcagctcaactacggcgttaccttccccgtgcttggaaaactggacgtgaacggcgccaacgctgcacccgtgtggactttcctgaaggagcagcagcctgggatcatgggcatgaagcgcgtcaagtggaactttgagaagttccttgtctccgccgatggaaaggttgtgcaccgctgggcttcccttaccaagcccgagggacttcaagatacaattgttaaggagattgagaaggcaaaaaaggagggcactcttgcttcgttgaagaagagtgaggctggtgctgagcaggctaagctgtcgtaaggctgtgcttgaggtgttattttctgaattattgtggtgataccttcatctgtttcattgtatctatattctggtgcttctgcttgtgacatactccttttcggtttacgatttcggtctccgatggaaatcaaaccgagcagtaatagtaattcatatcccagtttcaaagctcttggacacctgttttgtaaaattcaccagatcagttcattggatctatatccaattctccttaacatgaggcccgacttggtggtatgcccgatggcccatgatgccctaaattaagcagaggaaccacccttgggaatcagatttcgtagcgacagatcgtagaccacatcctcgaccttcttgacctgtattgccacacaaattagaaatttaaacggcgaaatagacgctgtcatgttttgaacgtacgctgtacttgataccgtcgctgcgcttgcgcaagatatcgttcttcaagtttaggagctggaacccagcgaaaacttccttgacgaagatgccaatctgcatgggacgggtgtaatcacccagagtgactgagttgacagccaagcgagcctggaacaaattagctgtgaacagacagaaaagctctgagatttgggaaacgaaccagttcctcaaccatggcaatcagtgccagtaggtaatcctcaatcgtcaggtggaaggcatcctgctcctttaagttgacaggaactgatcaaagaaatgctagttagtattattgtaattaatgtatacatacagcacccgtggtgctcatcatagaaagagataaacaaaacgtactgtccaggaatttgcccacatcatcgatagtcatgaaagatgttgagctaggtcccttgtgctcttgcagtcctcccagccatgcgcaaagctcaatagaggcgacctgatagattggatcagcatcagtcttccgacattgaatttcagaacacaaaccaggttttgcagctcacgggtccatagcccgttgtacttgtagaagggatgttgatctgccacggccttcagacgagcaatctcttccttttgggcaaggatttccttagtgacatcgtcaagcacgggcttcactattgtagaagtcagcaagacggttcacgaagaatagaggattagtgtggaattctgcctatgggaaaagtgtgggaatttgaacgttgtacggtgaagaaaagagaagcagttgatccaaaggatgataccccaatcctctcatcagaccacagatagataatggatacttacactgatcagcgggcgtagaatgggcccgtgacaggatagcctgtgtggaacgccctgtagcattcaatatcagtcctcatgttcagcttcaatcccgtgggtgccgtccggacaggggcaggcatctggaaagtcacgcattgtagagcatacctcttctggcgagtgtgcggacaatctcatttagttcctatccaatattgttagctacctgtcggtgttcctagctcaagggtcttgttccggtgtaggcttggcgcgcgaagaattcaccgaagtcaggacgcgctttggtacttacatcccggacagtgctctcctcgtcgatcttcgcctggagattctcgaaaatgcgttgatcaatcattttgtcacttggttgtgattgtagatagatatttgaaaaagttgaaggaaggtgtggtgttagaagtgcgctacgtcaaaatccacgttgaaaaagaggatagcgtgcacaaaacaacgcaattatttgcttacatcgaaaatgatatgatgagatttgatattgcttttttaaatatattttactgtcggaggacacttcctccagagtaaagtgatctgaggcacttttcttttaccatgatttacgacgcagcctacagctaccacccacgaaacgataataaagctttggaggattttcagcttcttgttagagatttggatcccacaaagaatgaggcttgcctgtgacttgtgtctacccccgatcaaaacgattgcaaaagagactcctccgcagaaacaaaaaagaacgccagaaccatgaccatatttgcatattttattgttgccagatcaagtctagtgttcgtcgtaaatgtcgtaaggaagcgatacatacactggccggtgccagggtaatcacgcagcgatggaggcaatgcttagtatcggtatctggtcgaataatctgcgaaaagtcggttgttagtgaaaggtgtttctattctaggatggatattgaatgtacctttggggctgaccaccagaccacggcccttcttggcgcccttgtatatcgtctcgatgatgtcgatcaactcctgcttgtcctccagcacccagttcaacttgttgttatttcctgtgccgaaatcgcacatcatgtgcttgttgcggtaaaagaacatgatcgtcatccggtcataaagctcgtacatttggttgaagtccgagacttggtcaaggtcgcataggtaaatgacagcgaagtctggggtaggctggttagctgctgttcggtttactgttggggtatctcggtcactcactctttacccgctcggcgattttgtagaggagctcatcttggcggatacctgggagaatgggttagccagggacggtggcaatatacgtagatagcactcacagtcgggatcatgatctcgcccgaatcggatcaccaccaggcgttcttcctcagagagtatagcctggtccacatgccaggctgtttgcaggtgagggaggacaattgaacccataacgatggctggttttgtgtcgataagagttcgcgcgatgggagaaatgaaaggcttatcgattgggccccgcgatcgaagctgttgtgtcatgtgaccactttggctgttctggacaatgttgtataactggggtgttgcctagactgttctgtttatttctcagtgcgctatgttagaaatatcacggtgattattctaaggttaggctgtgtatgacctcatccaggcgcctcacctaggcatcttgggctaagtactacactgtaggacgcattctatgaactacaacatatatcacagctggagatatacaaggtaaccccttgtctagactgtttagtctgttgtgcagttggtgtagatgtgcatgggtctaatccaagcgcctcggtatccgattaggcaagtacagtgtaggacgccttctaccgatgacagctaacagttagcgtctattcaaccaagagaaaaacaagagcatcgcagtttgagatatttcaataccccagggtctactccgtagtaaccgatcaatctaaaagtcaaagaagctaatgatgcggaaggcagctggccgagaaagtctcctaggttgattctttttggttgtattttctgatactactttaggagacaaattttacaagacaagagcccaatctatgacttcttctccaagtgcccggactagccgagcagttgatgaaaaagagttcgcgtcgatcgggggtagtgtaagcccaatgacactgtgcaacgaggcatgcgcaagcacaggggccaagtcgcgggatccaaaaataggaataatcaaagtgtttcctggacggaaactttcagagattaaactgaaaagaacagatactacacttgatctaagccaataggcaaagagagctgaagaagaaagaaaagaagaggaacatctgggggcagggacaccttcttatacacaaatcgatgtgggtctaccaccagcgaaattaagcgatccaatcggggataatgatcccgagactccggggatgtacctgctcaggctaagcgatagttatgctgactcacccagctgactcattgatccttgccctaccctatatcccaattgagcctagcgcaacacacctctggccgtgaatttttgctaaccaacattggctccaccgcgaaatttaggaagttgtcttgaccactctctcgccggcgcaggatattcacctctttgcgacctttcccaattccccaaaattcatctccccccaatccattaacaatggctcccgctgctgtacgttgaagtccaaatcgctttgctgttccccccaccggagtctctgcgggctcgtcttcgacaacactgtgaaactcggtattgaaaaatctatcgagtctcccatgttgtcgcaaccgaatctgcgagactaccaccggggatcgacattatggagcagtaggctaatttgattccatgtggtataggctcgtggtcgcaaggcccagaaggttacccagaagttcgttatcaacgcttcccagcctgctagcgacaagatcttcgatgtctctgccttcgagaagttcctccacgaccgcatcaaggtcgagggccgcgtcggcaacctcggtgaaaacgtcgtgatctcccagattggcgagggcagaatcgaggttgttgcccacatccccttctccggccgctacctgaagtacctgtgagtttatctatttcccgggatgcctcccgataggttggaatataattttgctgaccatttccttttcttcaattcagcaccaagaagtacctcaagaagcagcagctccgtgactggctccgtgtcgtctccacctccaagggtgtctacgagctccgcttctacaacgtcgtcaacgacgaggctgaggatgatgaggaataagcgtgtcgctcctgtcatgtattgtttctttatcccgttcatcgatcggttctagtctgtgtgtcgcgcttggaacgtctgtatggattgaaagcgagagccatgggggggataagattggtctatgaggccacgaataaaactaaaaaagtttataccctcattctcttcctaacataacgcgcatgatcatgtagattgtccttgtggtatcttatacaagacagtaaaaaataaaaaaccaacaaaatacgtgaattgaggacgagaaagagaaatacatatccaagatcacctgctgggctttctcttctgaaccgttgtccatgaagatgtcaaggctgatccttggccatccggacagaccaacttgcccccctcgattttctgtcccttcttcttcagctctttccatttctcgcccaccttcactctcacgagatcgcccgtagcaactgaatcttcctttgagtcgtgcccattgtctccgacctgaatgtcgcggccaaggtgcctttgaacaagggccttgagacttatccgaatggggagacccttggggtgggggtacaagaggacggtgtcaatcaccgtagggtgaatgatacggcaagcgttgaggtcgttgtcgattgcatgaccgataagaggtgtctcgggctggaggagcttcagaagtagattgcgcgcctctgcgggtgactgaacaagttgcaagggtgggtggattttatttttctcgtctcctaaggatgaatgtatgttggacatcggagtaccatatggacttgcggaagcatagtgttgtggtgtgacaccggaaaagcgtgtgttgagatctaatacttcgcccataggccgaaccagcacatcaagaagatcatcgcctttaggccagctgactgcagtgagacgaatcagttcgagacctaatgtcgtgtagcccatctcgcaatcaatagagaccggctcaagtggtcctttttccggctgaggtggggttgtctgaaattggaggacggatgcaagtcgcttggtctccgagactttgaacacatgtgttttggctctggtacacccggtagacgttcccagtgcttcgctgcagcagggaaagtagggctgggagggaccggtgacatggtctgttttcttgcgctgagggtaaacaggccgtcctggatgatagtcacagtagccaccgctggccagggtaccatcttcacgacgacccggaaatacctgaaatcgttgaccgcatctatcacatttctcccagcccttggactcatcgacgcctctcttggcagtttctatatctgcatccgtgggctgctttgtgacatatccgtgttcttcaagaccagtgaggggtgtgactagctgggatacaactgcaatttcttctgcgggggtgaggcctgtgttgatgggtctgggaatcgctcgcggcttttgaacggggtttatcttatagtatcgcgcgttcagatgggacatcacctctttggcccattcgtcgatacccatctttgtaactctcacgattcgaagtttgacaacattgccgtaaacgcttggactgtccctcgcaaatttctcttcctcatcaagggccattgtgatgagttcgtcgggggttaggacaaaacatctattcgagctatgcttgtcttttcgtagcttctcattgagagcagtcatggcagagtgcaacttctggagaatggcagtccgactgccatgagttgccggtgcatgggcaagcatgcgaggattcaaagattcttttggggctttgcgagggggaagttcagatgaagatccagcagatgaggtattagtgcgcttcacaggctcgttccccaaaggctttggtgtgccatggtttgaggtaggctgggcggtttcttgagctcctggggtgtcttgtgtattttgattttgctcggaggcgactgatttcgatgaccgccgtcccatttcgagcgatgattctttcaagctgtgagatggaatgagggaccccagcaactgtgagttttccactttggcccgtttagaaggagggccatcgtcacctgacactgatatcttcgaacgccgagcctcggctggggttgggttattatcatgagagaatatgcatttcaaaagagtgcaatccctgcctcgcgggcattgaattgccccaaacaggccgagcggcgtgaacatgatgaatggtcaccagatgagaagataggttaagatgtagaaatccaggtctcgaatgcaagagctagtaggccgatcacaatttttagaagtacctaacgaatatgtatagctatcgctgcccagcgatccttttgtgtttgttttgtgcactgaatagaccgaaacgaatagctattgcaggtagttaatgggatcgcattattcggcacttgcttagccaaagtgcattatatcaaacatagcaaccgggagatttgaaggtattgagaggtcagattgatatcacttgaggacaacgttggagctgttcagcgaagtggtaagtcaaggatgcaaagaagacaaacactcacgtaatgcctgatatttcaggcagaaacgagtggcatccagttcatctttatttcctgttgactcaaggtttgtctcgatgctagagagtataattctcatttcaattgagcctaaaactcctgcaacaatgagcacacagatctatgttgtacttgaggacttcgccggccatcgaagtcccttatcgccgatagctccaggctgacacggatgcggccttcgggtgaatagacatccggttgttgaataccaggctccttttcttccttttgcccctggaatcagttccattctcaaagatggaatcaaggaatgaaacaatggcaggtacttccaaagccgaccatctctgtgtcttagttcacgggtacgctgtattctccttctcaatgacgtactgacgagccgctaacgcaaatctccccaatagactttggggaaacccttcgcaccttgattatatggcatccgctctaagagacagatatggcggcgaaaacctctacatcctctgcccaaaaacaaatagcggcaactatacctacgacggaatcgagttgggcggagaacgaatagtgcacgaggtcgaggagactcttgaatctctagccaagaagggacaaaagatcacgaaaatcagtgtggttggatactcgcttggtggtctgctcgcgcgctatgcgatcggcctgctcaatgcacggggttggctggataagctggaacctatgaatttcacgacctttgccacaccacacgttggagtgagagctccactgaaaggatacaaggatcagattttcaatgttttagggccgaggacgatctcggcatctggccgccaaatgtggctggtcgattccttccgggataccgggcggccgcttctctctgttttggctgatcccgagagcatcttcataactggattgaagaagttccggcaccgcagtgtctatgcgaatatcgtcaatgatcgctcagttctcttctatacatctggtctctctaaagtggacccattccgggatctggaagacgtgaatatcaactacgtcaagggttatgaagatgtcattatcgatcctgacatgcatgtgcttccaccggtggaaagaaaccccgaaaccgcagcagcgcgattctggaagaagataaaatcgttgactctttgggtacctctgtcactcttgatcattgttctctcgcctctggcttgtacactcttcctggtaaatgccgggatccagacgtttcgcagttcaaagcgaattcgtatgcatgaaattggcgaaaacggcgagcgctttggaagatacagagtaccggttttggtccaagatgttcagcatgtcgtggagcaggcctttgataacgtcaatgctatacaagaacccgcttacctgtccaacagcgatactgaggtgtctgatgcggcgcctgagaagcccgctagatcgtctgtctcgaagtccgcgcaaagcgatgacactgagtctgcgttggctagacgttcatcaacgacggaggtttcggtgcattgtcctcagcttgcattgactcccgaacaatttggcatcattgattccctcaacgccgtgggaattcggaaatatcccgtccacatacagaagcaccaccacagccacgcagctatcatcgtccgggttgagaaggatgggttccgagagggtaagattgtgatgaagcattggctagacaatgagttcgcgttgtaattttaattagacatatagccgccctcgagcgttagagcatgcatgtatttatagtctcgacatttcatcaactgattatcgaatattactttatataactatagaatcatcctagcaatattcaaaattatgctcaattcccgaagagacacccggccaattcccttttgccgacttattttacggataacaacaacccaagcaagctcgtcctcgcaatataagtaccaccacagggattgtgatcgagcccagctatactcgcaatcctggtactaccctcttcagcactatcccgtggtcaatatccgtagtgcggcatcagcaaggtacactgtccctattctggggacctaggttggcatattagtgatggtatatcgggttaaagctggaaagttagtacccttataggtagttacctactgctaccctcctggatatatgtacttacttttcagtgaggaattatgttttgtctgtttagttttcagatcattcatttggaaagtttctttatcattgatcgttctggaatccatttcaggcttccggtagtactatgtagggaaaacatctaacccatgttgtaatttatctgcaaaaagaaccgtgccatgaattgcgacacaatgcagaagttcaagagaacaaggaacaaggaatcatatcagaacaggtcggggaaaaaacggaggaacggactcgattgagaccacgaaaccggttgtcgagaaaacgcagtcatgagtgaaagaagatcacatcataccgacttatttgggaggtgcttcgctgatgtcatagtcgagctcggaaacagttattcctttggaagtctttcgatgctcgcgctcgatagcaaacttgacggcatcaaaaacattatcgcatatctttctgggtggatagcgtgggacagcaccatcctggtagactccagtcttaaccagaatggagaaccagtcattttccgtagtctcgttaaattcatttgtgccacggatgtcggattccggagtatcgccaatgaagtacacggtagacggagacttgtcgatgccacacgagtcctttcgccacttttgcaaaagccgggtggcaaatccataggttccgagctgcggcttaccgaaagcagtagtgttgaggtctttgcctgtgatagccgcgtaaacagcctcgagggaagcgcgcagcgctcccatcccaagacgtgaatgttcatgcgatgttgaccaaaccacatcggtgtgcgagaagaagacaggtgggccttcagtgaagatctccgaccgtttattcaaccagccgtctttgctcatgaggcagtccaaaatgatttgctggtcaccagcccagtcgcgactatctgcaaagacgaagatcgcttcgatgcggaccttgtctaaatcgagcagccgggaattttggtgctcctcatccgtcagcgttcggaatggcgtagtatcgtgtctcgtcttaatgatatctccgggtgtgatgacatccttgaatccatatccttcagccacgacccggcatttttcaccctcgccaccaaccaccaggacggtgttgtatcgctctgccatttcgcgcatgggcgtgtggccacagataaactggccagggtcgacttccaggtcgagttgtttgctgaggtccaggcatcgctctttctctgtcttcccgccgccgttggtcaagaaaatataaggactataatgttgccgttagattcaaattccttttccgtcttttctttttttgctcgcaactgtttcccctcgccctgtcctgggtgaggaaccatggaaataacaccagggcaaatacttacactttgactccgtaggggttttcgccgttgatatacttcatagcatcaacggcttcgggaataggctcgccgcccttgatcagaacgccatcgatatcgaaggctagggcgaaatcatcgctagtaaccttaggagggttcgtcataggggtgttgattggagattcctcagatgatacttgatcctgcttggccatatttgagttgaagatattgtcaggagtgaaaatcatcgaatgcttaaagacgacgttaggcccatggagatcggtcaccctttgagttcctgatctatctgtggccatggaagatgaagggtgtggggcggcgggtacaatgacgctggcgctgccttgtgatgaagcgttataattacttcgcgtcaaatctcttacaaatgggtgccagctattgagctagctattccgatatgtgcgctgggtatgcgcttgaggtgtaggttgcaggatacaagcagatagagttgtatgttactgtatagagtagtggggggggaggccaagggtcattaatatagcccaaggccctaaagaaagaggttttacatcatcgacccttttaccccaaaaaaatggggcgttcaggttcagaccttgttctgcaggtttttctgggctaaaacaaaaccggaaaaaaagtgactatcgatccaaaacggcaggctacgagtcgggtcgatgacgctgatttggtaagaaaagaagcgcaacttcggatttaccaagtgcgcgggttgagggcagtggaggattgacaggtgtcgcaaatcaggaccaatcacgagggtaggatttgacaagatcagcccgcttcaagcctttttgcttgctttacacctggtcgctgctgcatatccttaggaagcgcctcttgcattcttcggatgtatcgcgtattttgaatttgacacaaaggccccgcggctgcacccacaggacatatcaggccattgacgtcatgaaactgggtcccaggaacggaaataaaaaccagcaaattaacacccatggatctacgacttataccgtatgaagttcttagtgaggagtagggcctagactgggtatgttggcgccgccacatgctggccgatactactgtacctcggaccaacatttagcatttgggctaaggaatgcaagccatagccaaaggtcacggtttggataaagatgaaatgtatttctgaacgcacataaaatataggaataagttggcgccaagagcagtccgagtcttactattttgaatgttcggcgcaatgaacactttgatgccctaaactcggtctaatgaactcgtgatatgcgggatacctgccagactgagtcagagcgccaatacatgcatatctgagctaataatgagaaaggaaaccatgggttgtattgtgtctgtcactaagagagagagaagaaggaagatcaaacaaggtggggagcaagtcctattaacctaaaagcagaaacagtctcaacaactaattatagcaccatacggactgcaagctttcgagtctcttcagctgatggaggattcagccgtggtcaagggatgtagggtgcaaccgggagtattctatggcgccatatgcggctgtcaacaacagctccgagtaggtagtctgtgcggttaaggagaggaagggtcacgatcacctatacaagcaagtgttgttgggttaagatgagtccggacctaggttagaagaatgttacgctggaatttaatatggatatttccgtgaggcatatcacaatcgaatcatgagatgcatcggaccggtagttatattatgtaaagtcctcaggccgagatgtcagatccagactcctccgcaaggtcatccataatagcgtcaaggtccatttcatgatcaatatcggcccagtcgtcaaagaatacatcttcctctccatattcgttctcctcccacggaagtgccagtggtttgctcggatggtagaacatgcgatggtagaagggcagacattcgcaagaacacacgtcgtatttgggcatatcaagaggataaggaacggagaccattgacatctccacgtttagttccgcgaacttgcttttccaggtgttgccctcctgacatatctcggtgacgggggggttgaatttggattcattgattgatgggagatgctctatgatttccggtacctcgcaggtaaagcgacgcagctttggaagttttccgtccttcaccatctcgtaaataaccgacgggagccaggccttcacttcatcgtatcttatcgtaagactttcgaggtttggcggtagaatatcatctaatggatccagttctatgcattccctccctgcaagtgtggcgagggttgttgtgagatgcttgaggtggactagttcaccgaagtctgtctcctcatcacctccccagtaaagatcgtaatctatgtattccagggaactgtcgtgtatgagggccgattgaatgtaacaatacggttctccgtcggggtctatcaattcatgtgatctaggtcctctgaaagtaaatcgcttcaaggctgttaggtattccagtgctgtttggaggtcaaatggatttataacgcagttcagaagagtcagttcctctaggggcgatgtagatgatgctggaggtgcaaggtcggcttgggacaatcggaaagtagcgccagtgatacagagctttcgtaaacctggatgacagaaaagtgcttcattgaaaatcggtaaacatctgccgttcatcttaggattgtgctcattatgatcatagtcgcttccgatgtgacctggtaacattagattttttttattcagtagagatagtcaattacaagactcacaaacacgcaaagcgggcagccccgatggggtttgaagagaagcgtgccagaacaaggtttcagccgctcgctcgtaagtaatctcgtgatctggaggactgaacgacgattcttctgaaggcccataccccaactctcgatactctttcacgcttcctgatccagaggcaatctttttcacccattgtaacagcgcgtcatctctggcatgggtactggcccaccgagtagaatcaaagggcctgggattccttctcaaactcaagttctctagattcggcaaagtcacagccatcttgtagaacttgagatgacggtaggaccagacttctgacccagcatcctgcttgtgtcgaatctgacgaatgagtggtgctaactctggacgcttctctatcgtgagagcaagacgagcaccactttcagaattgaacaggcgtacgcatttgtagagctgagggtcaattctggaataaagtgcggggcatgtttgagcaagtcggctcagatgttgggcggattcttcatcttgtaggtattcaatgatgatatcccacagctccagaggaaagacgggtagtaatgtagatctctgggcgaacgttcgttccgttggagtggccattgaggatgaatcaataggactaatgatatattgaattccgtacacacttcggaagatgatgagaaagatgtggagtccacgggtgatgggttttctactcttttttggcgggacccagcttcttatctaagccccgccttctgacctgtacgcttgacgcgttttcgcgtttcctgtcctgttttcttgaaaacagatctgaagatatacaagattagaaatataaaaaggaagctattaatacgaggaagccaagccgatattcaatgctattcttatgcgatacaaacgaaattcaaaaaattcaaaaattcaaagctctccccccttataaaagaacatagtaatatacaacaaatgcaaactctcatgatggcataaattccgggtgacatagccccatcaaagaaaataaatctattcatcaacgcgaagaatcaaatcatcgcccctcctcgacggcgtcaaattccgactgttcggagaaacccgtttcgacacagcgccggccttccttttcggactatcaggataatgcacatctccaggatgcatatctgaaggatacggcagttccccagacggttctcgggacttcggcggcgcgaggccgcgtccacgctccagccataagtcatctgggcagtatggcgcgacgacttcgctgggtggtcgtggactgttgcggatctggacgcgtttgatatcgtttccacgtacgatccgcggcctggatactatctctgagcctggagggagggttgatgatgatagggtggggcaggattgaggcgcctgtcgtcctggtgacaagctgcgattctggggttgagcttgcgtggtcttgatgggagcggcagggagaatgtttgggtttgagcaagagtatgaggtttgtgaaacttgatagggtgtagcgctactgtctgttgacgaggttttgtaagctgggttggcgttggaagggattgctaaagctttcggggacccggatcttcgtttgaaattgtctgttgagaatccctctttgaatgcacgcggattggctggcagtcctgcgagttttggttggatacctggcctagggggcttgttttgcgtcatttctgctgtcgctgccgccgctgcttgttgactttcgtcctcttcaaatagagtctccccactaggtggccgatgactccacttcagcggcttcgggtatagtccagctataggatctgggagtagtcgtgctatgctgtgctgtgacgattgtgtccgaggcgaagtttcccagtccgagtcagagctgatggcaaaccctattcgttcttggtctgtgggctctttgctctggcccaagtggtggaccttggcatattgcggtgagtatcgtggtggttgaacgcttgccattgaatggaaagtacgtggccgctgtgccattgtctcgcggtcactcgttgggctgtatgaagactctaaacccaagccgttcgttgggagccgtggcatgggttttgaaaagtctggaggctcagacatggcgcctccgatctcgaaaatgtgtggtgctgtctgttcccgctgttttcgtcgccatctcttgcagcagaaaaatacagcaacaccgatgatgaaaaaccctgccacgcctgatgctactgacattccaatgatcgccgctggagtgataccatggtcacctttcttattcgtatcttcagaagagtcactggaaatttgtccggtagaggatgttggttcaacttgagaccctgaagatgaagaagcagcatagaatgtgatttcagacgtttgactagtagttgacgtcggtgtcgatgttgatgttgctatagatgtacccatagaggcctcggaggtgtgttcagttgtcgaagtagaaatagttggtgttgtctctctactagtttttgcatcactcgtcttcgtcgtacttgtgtcagaaaataccgtcgcggtaatcgtctggtgtgttttcggaagagcttcagataccgagtcgcatatgtgataagcctttgactttgcgatgactgtctgtgagcatacagacagaacacagctcaaagccgcttcccccaatgtcaagctactggttgtcttggtacgacacagacacttgatattagacggtgacgtgcattcaatgaaggtgtattcggacatgatgaagctatcgacgcaatccttcgcacagtccgggaccatgtcatatagagctgagtttgctgcatcgctggaggcattttcggcggcagagcagagtgtggataagaggaggatcgcgatgagtatcctgtggataggaaggaggagcatgctgtggtagccctatacatgtttatcatgagcgacgatctgtcatgtacatttctcccatcaactgaccttggaaattcctacatgggaacgattacccgtgaaagcttgtacatgcggttaccatagttggtagatgtgtctgcgaattgagtagcatatgtgaaggtagtgaaattccagaaagagggactccaatctagttaaacaccaagtcagagcgcgacatcatcagaggcgcgaggcaaaactttccatgacgcccatcgactgttgcgtccaagtatctgcatttcgacatcattctgaaacacagtgcttgaggctgtgtatgtataggcgctagagtgaaaccgcataagattcgagatggtaagacccgcccacccacatccccacttcaggagacgaatcgttgtaatggtatagcgccctatcaggatggtgggcctagtaggcgtctccgatacgcgccgggccatcgaaagcgcttagactgcagaacgaggggtggatggcgccggactcggtttcagatttctcaaacttggtggacgagtaactggattgttgttttgggcaatccaaccctgtaacgctgtacagggtcagagtacatacagcgttacggcgttgtggttagtttcgcttgagttgtaggccctcgccggacaatatgttatctgaggatttctggaacagattcggaagctcgcggtgacccgagccctttttcctgtcgggttacacgtggctgagattcacaaggctcattatgttaggatcatattttgtttggtctgcctttttaccagttacgatggattactccgtatattgcatgtccgtacttaaccgcctaatctacaggcgctccctacacacagagaactcaggaggtttatagtaaaagcccattcccatgaataatgaaaactagccaacgggcattgatacgaaataacgcaaagtcagaccgtatgagctggtatcattcataacgaaaaagcaaaaaaaaaaacccgcagtatggagcaagacaaaagaaaagaagcaaaataaaagcataaccatgcgaccacacaaaatattagggaattatgaacatcatgccggactcgcgtcggacccgatgccaagtggtggaggctgcattaggctagtctcaaccggacctccacggaatcacgctgacaccgacgcccagaatatcgaatcgcaccgacccctactctcaaagcgcaaggcaaaagcaagggcttatgtgaaattgatcgcagtgcattcgcgttttcaagggacattaatcttggagagcgttggttgcgaggttgtgtgggaggtgggtatctctagtatttgaagataatgtagctataatatggtcagcggctgtcacaagatgctggcgcctcaaataaacacatacatggcgtggataacaccggggatccatcccagaatggtcaataggatgttgatcaggaaatcagcaccacatccgcgctccaggaagacacccagaggaggcaggataatggcaaagatgatcttgcaaatgtcactattggcagtattagtatactgagcataatcctactcacaggcgacagtgcgacctgaacagcgcgacctgggagggctgggagtgagggtaacaggagtgacagggtgacagggtgacagggtgacagggtgaaggctaggacttgagtagaagccacagcccatgacatagagaatggacaacttacgaagcggtgaaaggcattttgggcagatttgatggaggttttgaaatgttaacgggagaaatgggaagggaagtggagggagggaagtcttaaaaggggaggacaaggctgagagcttgggtcaattacatcatgggccgccaccttggtgtggctcgtagaagagaaaaaaaccaccaaaaccaaggaaaaacagactgcaaatgtggcttaggctatgccctgatttggcttttgacttttcttgacattttaattttaacttgtttatcactacttcgtactctgtgcgacctacggagtacaattattacattgtccagggttgccaagatactgatcatctgtgctggcggctgtcaatgtcattccccctaatgttcctcacctatcccgttcattcttttgctcgctgcctaaaagaaacttggcactagggattcacctgcacttcaatttcgaatttgtcgatcgtctgtgttctaagatttgactgtatatgttgtacagtacggggttccttgttacctgcatgtacggagtacatccaacatatgcgcccatgctgcagtttaagtttcataatggtgacgatctctacaaacaccgtcatttctaattttggcgtgaatctttacttggttaggcctgccaagtacttgccggactttgtacggtttgtagtgccaagtccccctagatcgtggttagacaggccagacagctcagccctatgatgggcccttgcccccccacctgccagggcacctggtttatgtggttggcgtttatgacatcctcgaaattaaaaagtggctggggagcattgtcagtgacacagcaacaagataagcattgaggcagtgaagggaccatgggtcacgcgtgataccgagttctaaagaggaaattaccagactgatcaaagtcgggtttacatatcgtttttcagccaacatcaactgcgtctaacaaggagttccattgcggtatgtatgtagatctggcgcaacagcaacaaactccgaccaaagctgttaactagtatgtaccagcctccttacccaatgtcagtggtcaagtccccattggcagcgagtctactccgtagtgtttcgcgagtagctacgtggttctttacttctgcaagagacccgccctgcggaccggggccccctgcggacttagatgttcagggccactgcttttgtggtgtccacagcagcatctgcatgttcttctgaaccccgtggattagtggtctagattccacttcttgctccacacgacaaggacagtcgattctactggtgcattattataaccaaacagcgcatgaatacggagtacatactccgtaactgcctcttcaatattcgcaatttacctaaagcttggaagcatacggagtaattataaggtgaataggggctactgtgtgcttttgggtagtcttttatcgatatcattctggttattccgctatcccttttatagctagaaatatgaaaatttgggtaaaatgaagaaaatatccagatgactctgcaacatatagagtacccagggaatatatatcgatggacggcggaggctcttacttgaatgaggctagcgtgccatattgagttgttcactcacaaccttcgcgctgtatcacaaccttgaacaactcaatctaaagctggtgtcaagtatgttgcgtgatagtatcgtacattgtgcatgatctctcctgagtacggtgaaaacagatgttccgctccgcgactgacccactatcctccgcaatgacttccgcattttcctgattggatcagctttaatcttgatatctcaatgtcaatgagattcaaacagatgagggtagccttcacttccggacgctggcagcttctgggatcatgcaaagcccctaaaagcctcggtcgcgccaatagatggtatgcgacacagaatttggccaaaggtggccggccctttgcgtacacatggctcacaaagacagcagaacagacagtgagcaaaaccaacccccttacacctttggaatccaagctaaatagtccaagaccccagatgatattttatccagtcttccttcagggcctgtgagcccatcagccgcgcccgcttctgtccctctcctcctcgtcaccccaagcttcgcccactggcttgattcttctagtcctttcttgtcgcaatttctcagtcgcctttacggcaactccccagggaacgatactctctatgccgttacagccgtagttgacgcaatcccgaatactacatccgaaagccgcaatttaagtgagtctgaagggctgtcgcttctgatagtagggcaatcaggcgtccaggcaaaggctgcaccaccccgtctcatcagaagctctgccagcgaggaaaccaatctcttgttttcattccaaaccgatgtgattggtcaaaccagcaagggacctgcgcatgagattgggttgcgcctagcaaacactatatttgtcaatgggagggaaaccacaatttttggtacacgttggctttgggataaaacctcaaacagatatgctttggacaattcggtcgatttcacaagctgcatgcttacagccacttcccaggctgtagattctgcattggagttgccactgtacccagtgactggacggcgaagagtcatgactagcatgggaaacattttacggcaactagcaaaatcgatggatctgacatcgacggacacaattcctgcttcgtccgagctcgagaaggagcttccgcgttatatcgcagaacataatatcgttgaccagcgtgtatccgtatgggcacttgtcgagaaacctgacttggaggtggctggttcaggcttatctacccatgatcgcttgatccaatctcttcaccgaggtgggaaattgcaccgtgtcatgagcggtggaggtggatggggaaagaagcagggccttctttcgctagatcctgaagtcagcttctctgggactgccaaccgagacgatcttgtcgcattgactcaagttttggatcctgatatcgcacagttggacacacttccttctattgataaggggattactgtagatgatctatctctactttcacaggttgctactgcaggtgattatattcagttctttgtgtcagtagaaccaactgggtcgcagatcaaagttccgagcaatcatgacttgcaggaagagcctatcagctatcactttggaatggtagctgattctatgaaacttgaaacacaccaaacggatgaggaaaacaatgggatcatttctttgcctcacacctttggcgcattgtccgagaaggcaatcgcctactcgcagcccatcaagggagaaacacggtcggagtcgtgcacgaagctggatattccaggatctcgagttgtcctcgagactgtataaacagcatgatacatgtacaataatgcatacataaccaactgaaaaaacctaccccagctgaatctagtcatacatgtcacatatgctgtagtcattacctgtccggtggatatgccaagacagtacacgtgacccagagaggccagcatgtttgccgtcgacctccaagcctctggactctttccatcctctccgaccgcatccaactgagctcgccgacctcgggtgtttttatttctttttaaaggtctaactatcccacgaaacctcgttgagtcgtctttgatcaaaatggcaactgaactttggtaagtcgtcagctagacctccctccagcccctgggtgctcaacagcttccgatcaacaccctgttatcaagcccgtcatcccccataatttatggatcagccttgctaacatttagattgacagccccgtctatgcggtgagtcttgttaaatgctagatctcgacacccgagcacaaccaagccaatcgcccgtgtctcggccctccgcgtcatccatctgctcacaatgcatccgaatgataactaatctttcttcctttagcccttttttggcgcgctgggctgcacctccgctatcgtcttcacctgcttcggtgccgcatatggaactgctaaggctggtgtcggagtttgctccatggccgtcctccgccccgacctgatcgtcaagagtacgtggatctcaacaagagctctgccgatctggcaatgagatactcctagtctcgcgcaaggatatatggcagcaattcgctaactattctccagacattgtccccattgtcatggcgggtatcattggtatctacggtcttgtcgtatcggtcctggtcgccaacgacttgacccagcagcttcctctctacactggtttcatccagctcggtgctggtctgtctgtcggtctggctggtcttgctgcggggtaagtttcctacacagcgaatcgcctattgttctaagtttgttgctaattgggattacagtttcgctattggtattgttggtgacgcgggtgttcgtggaacggctcaacagcctagactgtatgtcggaatgattctgattctcattttcgctgaagtcttgggtaagtcgtagctattcctcatacctctgtataattgcatctaaccatccctcacaggtctgtacgggttgattgttgctcttctcatgaactcgcgctcgaaagcaacctgctaaacgaaagacctcccgcagcattccgggaatgtaacgtcgaatcgcctcatggtccgcgcgcgattcctggttcattcccggatgtgcattctcaacatttccccgacgcaaaccaatgtgccctcttcggtcggggaagctgacatgataaacttggtgcgggggcaggatcggatgatatcggaaaatgttaacgatttcagcccatttgaaagtgaagattcggtgattgagtggatgtagaaccgggaaatctgttcaagaattcgtctgggactcggtggacaggtgtgggtagatattggattttttttggctttacgttgcatgacaccgcgctggactttgtactttatatgaaattcgctgatcggggacttacgtctccgtcctctcttccattatggtggtttggcaggatcttctgtaaggaatttcttgtttctttcttgtcctctgccctccctgtcgacatatgtttcttctatctcagggttgcttaattcttttgagtgatttgggcttggtagtagtagtgtgcattcagcccttacctaggtacggtgttgtgactcatagaccttggatgtaactacgtatagatcttcttaggcgtcggaatattgtgagtgagtttgtaagatatcatatttactgagataaaacaataccaaatcagccaaagtagtagcgccataacagaagccgagtaattaagatctatttgcttatccgaatgcatgggagagtcaatgcccacatcacacagcagccaaagaccgcaatcacttctgcgcaagttcagcagttcgcagctaaaacaccaagagagaagaagtatttgtgtatttgtggatatttgatcgagtatagggcgagagagaatagataagggagaatggaaaaggaataaaaaaaaatgtatgaaagcgaggatatatgccctgaactctcacaagacttgcctcgacccaaaatgcacagacgcaggcaagatgcaactgatagcaaaaagaacaaaagtaaaccaggaaacttcaagcacaagtctacttgtcgagtttccgtcttagagtacgcgttctcttcatcagcttcttgaacttgtgcttcttcatcttagccttgcgccgtctcatggtgctgatagcatgcatggtgcggttgttgcgcagccgttccatatatgtcatacccgcagcggaatcagagggagcctcgatagagatctcgtcgcgcatatcagatgggtcttccatctctccgctgcgaacgaaaggtcccgtgtgtgcctcataggtcttgcggccgtcggcatgacgagcctcgcgaatagtcaggacggtcgagtaggtttgatactcattgtcgacctgggcatcgatggtctcggcagtctcggcaatctcggcagcggatgtgttcatggcgacgggcgggggaggaggctggaatgggcggagacgacgggtgaattcctccacagacatctttgagtcggggccatcaagcatgcggagttcgccgtcctgttcgctgaagctccgaaactggtcttcagactctgacatgccttgagaaccagtttccatcgactgcacggccgatgaaagagtgaagatgacgtcttccggttcattcttcagcggacgctttgacgagaagatcgcttcgaaggcatcggtgctcgaggtggggggcacagtggtcgtcaccgagattggccggtggatggagaagaacgacgctatatgaacatctagcagcgaacaaaaagaaaagtcagcttctagtcatctatttgcgagacaaaaccatacacggggcttgctggggtttgagtactaaccatgtggctgtcggtgctgtgtcgatggaacacttgggaggttggaaaatgccgtatgttgactagactttgaagatccgtttcgggtagagctgtccttcccccgacggcggttagccttgctcttctcgctagatgagttgactccttttgccggggcagaggtgtccattcgtcgggagccatcgctgggcgggacgggcggtttggaggatgaggaggaataccggcgttggtgcagaggtcgggttgcgccgagcaagctgctggtaagattttgaccggagcgagttataccggaaagcggcatgggagtccatgcnnnnnnnnnnnnnnnnnnnnnnnnnnnnnnnnnnnnnnnnnnnnnnnnnnnnnnnnnnnnnnnnnnnnnnnnnnnnnnnnnnnnnnnnnnnnnnnnnnnnnnnnnnnnnnnnnnnnnnnnnnnnnnnnnnnnnnnnnnnnnnnnnnnnnnnnnnnnaagggggcggggcccccccgcccgcccggcgtaaggatgttgacaacatggttggtagataacccagtcactactgagagggtgaatgagtctgaatcggaggcgaaatcagtcggcccggaactcggggtcactgatcatgcggatgtttatgtaatattgatgcctaaggcgtgacaagttatagaccacgcaattgtggttccacttgatgggggaaaaccccttcttttatacatattgaccgtattgtttcttcgggctatttcaaacggccggatgatttgatagctaaacttaatctctcaaggtacatcaaggctagagtccgaaaagtgaaaaaagtgcccataaaagagcaggatgtcgagttcattcagagataagatatagtaaataaagacccagaatgattgtgataatacagagcagtcgttagtaaacacagctgcaaagacaaacaaatggtatcactatgcattaaaccaaaaaatggaggaaaatggggatggcaacgacacagtcgctaaccgaaacgtgggcattagttggcgaaatcggataggcttttggatgcaacgtgatagacccaatgatgtgagcagagagcagataacaacctctcggtacgcctcgttaaaaaataaatcaagaatgaaaaaaaaaaaagaaaatacggcaatgatcacgaaggagtgaacgaattgtagccgccctggaatgcaaccggaaaataactggtaggctgaagagcttgagaaataggaaatgaagtccaagaaaaaaaaaagaaagagaaaaatcattgtcagacagggtcatggggaatgcctcgggaatttgagggcctctgccttatagtattaaggtatgcagattcttctgaatgatcatgtcctgtactgaatccatagtcgccttgagtaatgttgtatcagttgcgttagtgtaatggatgtagatttcgcggtctgggatgcggttgataccgcggaatcggtctgcaaagtactgtgccgaggaatcatagtcggtgtccgagccggtataatctgggaagtgtttggagatagaggagatggtgagctttcctttgaagagatcaatcttgttgaggaacagaatgattggtttgcgcttgaaccattcgccgttgactaatgattcgaataacatcatggcctcgtgcatttgattctgtaagatgtgattagcggtgctggcgagagaattgggaaaatcatgcttacagcattctggtcttcgactagacattggtcatatccagataaggcgaccatgaacaatagacactggacaccctcgaagcaatgaatccatttcttccgctctgaccgctgtcctccaacatccatcatgcggaagttcatctgcccgagctcaaacaaagtttccgtaatacctgtcgtccgaagtcgagcctgcaacatgtcctgattatcaggaagccagcccggggcgaatatgcgatcgagagatccatagaaactgaatttcatcagtccaagcccatgtaatatatcaccaactcaacttactagtgcaagttgtcatggagagcaaattcatgccctcgtgcaacagcgttctgcacaccttcatccttccacatggccctcatcgcatcgcgaacctcgagattggagaaggcttcgttggatcctacatctgggtccgtattgtctaataggtcggcaaatggctttcaaccctcgttagctgatgtcgggctcttgagaaaaaggctggttagtaccttggtcttttcctcgttctcaaaatcaatatcctcggcattcatgatatccaacaagaccttgaacgcaatgacgatgttcgagtagattacggcacgggtttgatgacgctcttcctcggggaagccccggctgtgaatgattcgcatctgcttgattatggtggacttgccggactctcccgctcctgaatattctattagtaactcgatcctgaagcaatccgacaatcagcgaccgagaatcacccacctaatagcagaatcttgatggtccggtccagcgtcttcttgtcattcttgatggtccggtcaatgcgcgcattgcgctggaaagcatccttatcaacctcctcgggctttgaaaccaagcaacccatggtttatgtccggtaacggcaaactacctagcgcgatggtggttagcaacggtttattacaagctgaactagtttgacaaggcactcgacggatcaacgcgttttcaatccgagtcagggatgcgattggattgcgccacacgggagtccggtcgaagctcagagacaaaagactcgactagactccaccagactcgacaggtgactagactctctccgcgcaaggtgatagatgtgcataccttgaaaaagaacaaaatcctcctctctattatgcctaagtccaactccgacccaacgtcgaatgactggcgtgcaacgtgataggcagaagcttgaaaggttcgatgggtgcttccgttattccccacacgtatcgaccacgttccgttgcgaattgagcggtcgtgttttcaattggactaggttatcctccgagacaggcgccaaacgtgagcgacacaacgtcagcctgccgaaggccgaataggaagcttgaaggggaaggacgttggcggtgacgggggggggagccgagatcgcgttccaaagttcaaaatatggacatttcccgagttctgaggacaaaaggacgtttcggaggctgagagccgagttctccggaggggagagggggcgagaaatggaagaaatggaatggcgcattcaggtcgtacgtctctcccgtcccacgagcgagtccacaagcggggaggaggtgatcacctgtcagatattctggtattttgtatactgatttcggtatctttgacttgagcttttgtcaatgttcggtatttggagtatttggagtattctcaggtattttcgcgtgttcttcaggaaaatacgtatgtcctcgttatcatttccgttaatttcttttcccttgacgatctcctctttgtattggaaatactacaaaggctttacttttacggactccatccaaatcttcactcccagggggccgctaaaccgatccactatggggtgggcgcttgaccccctgtctgcagcatctacgagttgcggacctatcaattgtaaacagatactgcagctcggttgttctattgttcgattgccttttaccgacactatatcttttacagtctgacaggagacatagagggatgaggaaaacttagggatccatcaaatggaactattggaaccgcttcgggtactccgtccacacccacacgttgatccaatcagcagaaattctgtgacaatcgaattgtttttcaattttccttattttgtcttacttttgcaaatctccttccttaaagaaaagaagaaatcggcatggaaatatgtacaacacccgatgtacgcaatatcaaaggaataatgtacgaagtacagagtactccgtacgaaatggtgcattcgccaagccaattcggaatgcaaagctccagcgatcgacacgaagctgctgaaacccgcatggatgtgccactggccaatgcaagggccatcctgaaacgttggcggattcctgtcccgggtttaacactaagggtatgcttggatcactatgggcatttgctcttcttcttctttacttccaaccgagatgttgagttcgtctactggagcttatgaaattcggattccccaagagaaccgtatgaatacatctacgaccacagttctaccgaggttctgacggaaataaggctagcaccggagtacagcgcttaaggggttccgcacaaaccaatcagagagtagagttcaaacccaacattcgacattctgaagggctccatcaagagaaacagatgttcggtacgaagtattccgtgggtggaccgtgactatcgtttctcttcgcccccaagcacacaatttctgccgtgcttgagccgcagatgttgtatagagtatcttgaatttgactgtgacgaggattgcgagatgaccaactgtgctcaacgattcatttctgcatatatgcaaccccgcaatactcagtactccaggcccgtcaagaggggggacaaagactgattgccccgttctaccggcagttggcagtccccattttcaagatatgattctcattaattgcgggcaatatcaccacaccatcgtgctagtaaggcaggggtgatccttctgggactggtcaaattcacctgtggggatcgattaggctcctaaaagccatgtcacatttagccggaatcctaagaatagaccatacaacgttcaagtttgtatgggatgatccggatcaacctggaccaacctagttcgcatcaccgaacaaaaattctccttgactcgacatggtataggaatcgccatgccggagatgcgatcgagattatactttaggagtatgaaatatgtactccgtacataagtacggagtacccggagggtcgatctaggttgccccagctgcttactagttgctactactagctgcttactgatgtaaaagagcagcccacgggtctcatgctcaaagcctgagattgggttattccccacatgcaactttcgaggaatttcccacgtgtggcatgtctttttctctggcaggtttttatattatccaatcccctggcattctatttctgttgtatgcataatgggtgttccgctggtatcaagaagtttcaaataaaatcgggagctcacaacacaaatacctcacacagtacggagtatattgtatgtatatgtgttccgtactccgtacatacctaacagatccctcttaagaaacgggtacctaccatcttgctagggattttgacactaaggcggtgtgaagggcggtaattcgaagcctggcaaatggtcgaattagaaatcggaatccccttaattaattcccttcccggagatagtcaatagggtttagaactttaggttcgtcaaagctagacgccacacataaataaatctatctatgaaactatacagtactactccgtacgcatgtcaggaactctgtggccggtatcaaggttaacggtaaacctaccaacggccaaactagtactcaggggcgttgaatgactcgagcaatttaaacgttgtcgatcggcatttgactggtccaatctcttggttttcaacgtccgagcgtgagtcgttcgggaatagctccggagctgatatacctagtccagcatagcactcgtttagatagcgagacctcattgggtttctttttcgagtgtaatataactgcttcgcttcgctccgcaatgagaataatttactcctcttctacggagtatatatatattcatccttatctctccgacgcacccgtcctttatataaacgttagctatcgcttcatacaagtctaactagaagacaacgtagaaacttgaccgagtctaattcctaacccagggtagggttttcatcctagaggctaagtcaattattataaacctactcatctagttattatcggccttagatacgcccttagttttagactacccctcttaaacctctatacatcgggaggactttaagactcacaaaagaaagacataagtatcgctcatcgtggcaaacggcccaagtcattcaatattggcttctgattttccgttccttgcagttcaacttgaacgggtcttcacctggcctcggtgatttcgtcattttaaactgtattgctgtgtgaactcaaaactgatagacaatttacggagatcagactgctaatatcggtgcttccatctttcgttaggaggggatcagcgccatcgaaatctcgcagaagtttctcgataagttcagcacggccacggccacggcccactagcatggagaatgttaccgatagttgcagggacagctagaaaccccgggtttggatctctaagaaggggatccttattcaaaaggtgatgaaatttgccgtctggtagttatgtcatctgatgaactcacaggctggtagccctgtaaagtgatttagggatacttgacgttcgacaaaggtggagagttctgatatgacggatggacttaagtttcgcaggtccgacaatgtagtttgtacaagtcaaacaaataacagaagagaaaattttgaacttggatggaaaggtattttggacctttgttcgggaacgagaccacgggggaaggaagttataggcttcaagtggagaagagagaagtagtagagtggggcaaagaaagtggggctagccgtcctagtcatgtgacaattcgtgaagaagcgaagatacggcacaactccgtatattgtggtttattttatttttttggttgactagtccccatgctaagagatggggaatactccgtaccgatacttgtctgtcgatccttttctataaggggatgaaattaactgatagcgtggcaggtttccactaaatagaattcttgcacggagtactagattctccgtagttagtagttactccgtaactagttaatcaattaaataataatgattagcaaattttcacttcgataggaatcccgaggtccactggtactcttcgccagtgcccagagtgcagattgaacaacagatgtgaagcctttgtggatgcctcggagacaaattgttggtgacgtcactgaataattacagaaagagaccacatctcacagaaccgagtcttatattctctatactcttcaggtctacaatggaccacataaagaaaagagcgctagtggttgtcttccccatgttcaacatccttgatgtgagcggtccagtttcagtactcttcaacaccacggacttctccgtgagctatgccgcgaaggatgagctcacaacgtctcaagagaacacaacaattaagagagacatatccctcgctgaagccaaacttcatctgtccgactatgacatattgatcgtccctggttcacgaccaaacaatatcctaccgcttgtggaaaccgatcaggggccgttatcggaacttgtcgaatttatcacctgttttgcatccgacatggaccaagatagcatgcggcaacgtactattctggccgtctgcatgggatcctacttcctagcctttgcaggtgtccttgatggcctcacggcaaccactcaccgtcttgctgtccccgggctccgagacgtaacccaacgttatgtggatcgaacccctgctgcgaaagggactcgagtcgtccccgaagatccctcggatctggtttcctacctggatgctggccagaatcaggccggagtcagaatcatcacgacgggcgctatggccaatggcatcgatgccacattgcattttgttggcctttgttcgggtcggtcacttgcgattgaggtggcggagctcattggatatcggtggaaggagatctaggtgtgaagctagtggtacaaggaaagccatggggcagggttgtcttggcagacctggctgttttcatacattcgcaagcagtgcggaatacgaaatcaccgcatagagtctaaggtctggtgttatatgcctgtttgacgcaaacaaccacgagcgcttctcttgattgcacgatttgcccttatcaatatgtcatactcaaagaccatgccctcaatttgcccatttgtctacctggcctttttgtttgttttctaaaagcgaaagtccataatcggagttaagcatatgctagcaattgtaatattcaatgtcacccatatgcctgtagtataatgcggaccttcatcagacttaaacgtaacacgaatgatgggacgcccctaaggcctccaccaatcagataggttgtagatgcgactccacgcttcgagtgggaagtacatattgcttggaatgtaatcacaccggaaatacagaactgcaggccttgagtcaggttaaaatgctttaatctattgcccctctccccaaagagaagactatatcccagtaggtgttccaatttctagaaccttgacaagttgctataattcgaggaacacgcggtaaagctatagtacagacagagtaagctccccacatttacccctcacgttgactgcagctatcaagaggtctctcaaaatttcccgttacctcttgtttgcaatggcaaataccatattatcaatagctgaccttgaggaggcggcttccaactctctacccgtctctgcgagaggtatttattggttccccttgttgttatctccgatatctatctttaacacagataaacagacttcttcaactccggtgcaacgaacgaagtcacactccacgaaaattatgctgcgtataggaagtaccgtctcttaccaagagttctgagaaatgtgtcacttgtcgacactggaatctccctctttgaccgagatatcacatttccgctttgtgtctcacccaccggaatccaggctatggctcacccagaaggagagctggccacaagccgagcctgtgccaaaatgggcgtcaacatgggtatctcctcttatgccaatcactcggttgaagagatcaccgccgctggaaaagaagtagggtcaattcatcatgtgatgcagctttacgcgatgaacgacaaagccaaacaagaacgaatcatccgtcgggctgaggctgcggggtgcaaggctttatttctgacagcggatagtcccgtactcggggtgcgctggaatgaatggcggaatggatttatgcctccagttggcttagggtatccgatgtatgaaagaacatctgccgagattcagcagcaatctcacgatgatgggtttagctcgacaaactcggattcccattcctgggccacggagataccgtggttgcgcagcgtcacgaagatggagatttggattaagggcattctcactccggaagatgtcgagactgctattgaatatggctgcgagggtatcataattagcaaccatggcggtcgtcagttggatgagacaccggccacaattgatgcgcttcctgcctgtgctaaagttgcacgaggacggatcaaaatccatattgatggtggaattcgatctggggtggacattttcaaagccttggctcttggtgctgaatgctgctgggttggtcgtcctgcactttggggacttgcggtaagtgctccttgtttattcaagaatcctgataggcggttatacttacttttttggtagtataacggtcaacagggagtcgagctgatgctcaggatcctgttcgatgacttcaagcgatgcatgcagctcacaggctgtagatcgatatctgagatcagccccgcaagtttagcagttgtcaatgcatatgggcctttgtctagactgtgatcactgttgtgattacatctggtgcccaaagccttatttccatacatgcttagctgttgccactttttgatcccggtataataataaggttctaagcaaacggagccacctgcccagaattgggggccacttcgtggaccttgcccggttcctagtcccagaggtgaggcttgtagttgtcatggcttgcatatatttaatctgcatctccgtataaagcctaggcctaaaacaccactattagaaaaatactgttgatagaacttgactatgactctttggagggggcaaaggtgtgaaagtaaatgacgttcaccacctgattttcaaccacctgccttacaactagcatttcaaccaccaacgttgcaacctgctcttcggttcgtaaagttggtagttgaaatgcaggttgtaaaaaaggtggctgagacgtaggttgaccaggggcaatcgtgagtctagaaatcaattgtcgattgcccgataacccttaactctatcgaggaattgatctgcgctgattgataataatagcccattcccagggcttaggtgtggcttaacttattgtaagttgaaagtgtatcgtcccgaggtcatctgcgggggcaaaccgctgagtcatcattggtctcgggacagctggagccgctaagctagccccgagtgtgacgccattatcccgatcccagcttctcctcattgcctaaggagtagtaatatgcaccgagactcattcagtccatgatcctcgggtaagtatcatcttctcgaaacagtttatcatttttaagcaaggctccatcatcattcaggtatgtcttcatgtccggcagctatgaggaggtgctaatagctcctctgggaccatagcaaacgtgactccaacgacctcgttgcccaatatgcagtccgagaagggtccgcttctggatgtgaacgaagtctacgactccgaagacaatgactttgtttccagccacaccctcgacaataagctacaaagaactcacccctgctgggcgagggccctgagaaaagggctctgcgtctttgtgatcaccggtcttattacctactatctaggcttatcgcatggtatgagccccctctcgctattataatgcgtcactaacatgatcgtccttatgactaggctctccgtctactgagaagaatccgtccccacactcggaagccccccagctttgccagtcacaagaatgcattcatgctgcttccgaaatcctctacaatttggatgccaactacgagaacatagacccctgcactgattttgaccaatatgtctgcggtggatggagagaacaccatgacatgcggcccgatcagggatcgatatttgcgggcacaatcatggaagagaatgcccagactaaacttcgccatatcttggagcgcacagaaccgccgcagtcttctgatgctgataatttcaagaaactcaaagctgcatacgatgcttgcttggacgagggtacagtcatcaaacgtggcagcaagcctttgactaatattctggatgaactgaaaactatctatcccgcaaaggcagagggtcttgtgaaaggatcacatgatcaactcaccagcgctttgttatatctggctaatgctggtgtcgaggctctggcttcttccggtgtcactgtaagtctatgcgacctatactttatgggcgccactaatgacccctttagcccgatgatcgagaccctgataatgttgttatcatgatctcaccgcctcgtgaaatcggacttccggcaagagagtactataataacacaaagaccgtggctgattacacgaccgttttgaagcaagttgttcggggacttgctggagatggattcgataaaattgcggaggatgttgtagcctttgaaaagaagctcgcggatgtgaccccggacacccaaacccaggaagatgtcaccaaatactacaacccccttagtatcaaggaaacggaggcgctggtacctgagatttcttttactgatattatttcatctttggcgccccgtgactacaaaactgatcgcctaattgttggatcgccttcctatatgaaggcgttgtccgttctcttgaaaaacacacccagagagactgttctgctcttcttgcagtggaagctcatccaagcctttgcggatgttatcgaggatgcctccattgaacctcttcggcgattcgagaatgaactcgctggcaaagagcctcaggctaaggaggagcgatggcgtaaatgccttgggcgtctggatgaagggcttgaatggagtctcagccgtttctatgtgcttgatgcgttctctgaggactcgaaaaagcttggcgatcagatcgtttccgatatcaaggagcgatttatcttcacactggaccagactagctggatgtccccagatgtgcgaagattgggcattgagaaggttggaaacatcatccagaagatcggatttcctacaaagagtcccaatgttttagaccctgaggatgtgaataaattctatcgggagctggaattgtccaaggacacattctttgagaatgaggtggctgtggcgaagtttcaacttcgcggcgaatggtctaagctcggaaagcccaccaaccgcgacgaatgggatatgagtgcaccgactgttaacgcttattacaacccgccaggtaatgagatcgttttccctgccggcattatgcagccgccagcgttctatggaccttcggctccgctgtatctggcatatggtgcatttggtgctgtgagcggccacgaactttcacatggtatgttcagttgtctgcaaacctactgccattttcccactgaccaacgtgatatagctttcgattctaccggtcgacactacgacgagagtggaaattacaccaactggtgggacgacaagacagttgaagcatttgaagagcgtgctcaatgctttgtcgaccagtattccaagtttacagtcattggtcccgagggcaaggtcctccacgtgaatggacgactgacactgggcgagaacatcgccgacgctggaggattggcagcatcataccatgcgtggaagaagcacgatgaggcaaagcctgatctccacctcccgggattggatgcatttaccaaagagcagctgttctttatatcttatggcaattggtggtgtggaaagactactcaggaggcggctgagcgggcggtctataacgacccccatgcgcccaaatcggcacgaattatcgtgagtttcgtcgatgcattcctttctttgtgttctatcactgaccgctgtcacaggaaactatggccaactctagggagttcaagaatgcctttagttgcccagacaggaagccagcttgcaagctctggtagttttgagtagtgcacttctgtcaatggcattcacttttatgagtttttaatcaattcgaggattctgacttcgtcacgactgaagtatctagctgcgcatcccatttcatccttgcccggtacttgaatggatattgatgtagctcgctcgtttttctcaacctttcaattttttaccgctgggccggaagcgttgcaagctaaaattttaaacttttagcgagaccgaagtacttgacatatattactcatcatttaaatcagcaaagcaactcgttggcaccaacgatgtctgatacatcactgacccaatatatggatgctaacgatgtcggagaggaggacctcctgctcggccaagatgccgaagcccttaagctgctgatctccacagcgatcgctgcccgaaacaagtgggaataggcggaccaggcagaggaaaagaggttatgtagttagttacagagcacggaatgaagagtcggccagtggatttagttacctagatcagcaaggacctagccccctcacttcttcagatttagatgattctaggtcccgtttttttcccaatgtcgacatgtcaaatcttatggaccagtgtcagtttgatcgacagctgacatgtgatgtctcacccgtatgcttggaggccagatcgacattgagcactccgtatattgtgctccgtacagagtcgacgagataaaggatcatatgaagctaaccagaaatagtgataattacctgacctcctgaaattttaatcatacgatcgtgggacctcagatcctcggtcatgtgagagagtccggcattagcgctagatctattaagtagggcagccaatggtcccagttagggcgttgctgcacggtagttggtttgcaatgagagaggtcacacagcctgcaatcgtatagagacttcgatgtactccgtccgaagtaaaacatctgaattgatcgacccagatccgggatatgtcagacagccggtagctccgtcaatttccagtttcgcgtcactccattacggacgattcaaccaaccagaacccctgcactgccaattttacctacgaagtgcggtactttggaggtggttttcgcttttcaccggccttccggaacgtagtgacctatcagctctggcgtgattcgtagaaagaaatgagggatgaatagtaagatattattcaagtacatgtatataccccgtactccgactcctccggaggaagagtcaggtatgtatagaaaataaagtaagtaaaaggggctggacagttctatggaagaacacgacccagcgttcccacttgtgttcttccgccgcgtcgggtcatctccacaaaaacaagagtcggatttcttccctttttttcctttctaaatttccttcgacctcataagtcatgtattactttgtatgattttgccctgaccgattccagtggtacaaaccctggccccgtcgccacgggagcattttgcgccgttctcatagctctcgcgccatggagccctttcctccacccgtcgacccgtcggagttcaaggatgcctttctgggcccgcaagtccaaatcaatgaactgccagcctcaaatcaaatgtctagtggagggccccagaatccaatcccgaatcttcgccgtgccaatactgtagctcagaccggcaatgtcaagcggaatctagagttgaaggcagctcgcgagagaacagcaactgggataagcgccaaggatagccatgagcctatacgacagaacaaattacaacggtctcaaacacatcgtggccccctagaggcgcgttcacctgggaggaaggccggccatttcaccgtaagaagtgtcggccaaaatggcaaaatatttctcaggtacaccaatcaatccataattcctcgtgctcggtcatatactgtgcagcctgctgatagtaggactatttcaataatttaggccgattgccaatccgccccagacaagcccacagcttgcatccttctctccggttgatacctcgaaatccagtccccttcagccgcagtgtcatgcacatacccgcgaggacgcaaatcctttcaggtggtcgagctcccaactatccgagttacgcccgcgccaacagcccgaagatcccgaccccgtcctcgctgtgtctcctcccgagctctcgaacctgcaccgcacgagaccggtctcattttcgacgatatcggaccagcaatcgatagccggtgctgggaagcgtggggagctgcggattgtcatcgatagatccgaagaccgccccaagtctgcaggtgagaattcgacaccagcattggaggttcctattccgcgttatcggcttgggtcgccgcgattcaacaccgaaggcagtgcaataatgcagagttctgtctacacgcgaacctcgatgtcggataactttccagattcgacactgcttgggggtagagccgaccctctactgggactccatagtccatatccccgagactctttctcgcggcatcggccgtcttttgccatttcgatgttctcaggaaccgcggcggctatggacatgaaccgagctgagccagtcccgaggaattctatggtctatgaactggaagagccggtggagccatccatttacgaaacgctggtctatgatatggatgatgggtcggttgtccgatacattcctgggaccaaggatatcagtgctgccacacctgcccgaatcgttgcacaaatctcctccgagtcattcatggactatgagctagtatcggacttcttccttacctttcgttcatacctatctacaacacaccttttggctcttctccttgcgcgcttaaagtgggcaatcaaccggctacaagatgatggacgcattattaggattcgcacatttgcggctttgcgacattggattctcaattactttgtcgatgactttgttacgaattacgagcttcggacccacttctgcgagaccattaacaagctatattcagaggtcagatctcgacaacatggcggcacgagtgatcgaaagattcttattgacctgaagcgttgctggaatggcaaatgttcggtttattggtcttcccccgacttgtctcgtgcctataacgacccagaaatatcaatcgtgcctggagatgctcagattgagttgcctaaagttgaggaactgcagaaaaacgtccctattcatggaacgacgccccgtgcaaacaccacatttcgggaaagtcttgctttccccatacagcatgatcgaaatgattctgcagcaacttcacaaagcattccattctctgacaaaagcgaacagagcttgatggcactctcgtgttcattaccacctaaatctcccaggcgcttttccatgtctgcctcgaaaggcaaggcaccccgccctgtggtattgggtctcacaaagtccaagtctccgtctaggactcatgaaccacctaggtcacctgtatcttccatggtctcccggcacccatacaccagtcatagccataaaagaagcggaagcttctcagactcggtgcgagatggtcgactgccaatttttgcgatggagcctgaaacgggacccgcaccacaggagatgctcgatccggttagtttaatacgtggagagatgtaccctcctgcagagtcgtatatgacaatgatggcaccggagtcgccgcctcttcctccgccgttgaagaacctaaatcccgatcgtcggagtacaccgggtgtgcctaagtcgtcacctaactcgggtatgagaacaatcattggctcaatcaaacgagcgctgcacacgaggaacggtgggcagagcgtctctgctcgcattgcgaatgcccacgaggctatttcatcgccttcccgaggaaagacgtcggcgatgccaattggactggctttcggctctgaattctaccgggagagaaagatggctgccactcctaaatacccaggtcgaattgatctactatgtgacgaggtcctcaagcaataccgcttggccatgaaccaggaaggaacgaaagagaaaacccagccaccagctgcttctgactttcatcaagtgaccccacaggagcctgctgccaacacttctaatcttgtaccgacgcaaacccccaattccgactccaaactcaggagcggtatcaccatgggcagcgaatcaatcattatagttgatgataccggtttcgaaatgccctttatgtcaggggcagcacaggaaccaatgccaattgttaatgacaatacttgtgaaacgccggaactcgaaatgcccgataacgcctcaacgcaatcgatacccgtcgaaggagaacatctccggccggtctgctacaatgccgaaaaatcagtttcagctgctcagtcgaatatgttctacccccttcgccctcttacgccacagagatcgtcatcggccgaacgcggatcgatgcccacaagaaagaaaaacaattctctatctctccgactcagaaagtacgcgtcctttcaaagcgggatctcgaaacagcggttttcgatgggcagcgagacggctcaatccactattgactccttggcgatgcaagatcagaacaacaaacagtcagggccagttcttcgcaggcgtcgaggtggaaacctccgtcaaatgcagagtggagatgaggccgagcctccttcctgtcgtgactcgtttgcgtcttgggatgattcagccgtggatgaaatgggtagctctgatggcggtgtctcaagtcctccttcgacattgatacctccaaaaccccaatactcacttatccagccgcgcagttctcggcaaattaggcgttcctttgagtcggtcattgcgaagtttgcacagattcctgatgatggcgacggtggtatcgagtcaacgctgttgaagctggagggaaaatgggatggaccatccagcgccaatcgagacgattcgtctgcaccagcagaggtgcctcactctcaccgtgagcactttttgattccgcattgcgtcgaaacttccaagcctgagtgggatgttctctctcgtaggcgacagacggaccattccgcgtattccacggttgggggtcgattggcaccacctagaccttattctgattctgttaccgaatccgaagagtctttcaactctattccgcttcttgaaagaggattgaccgacgagtccatgaaatggcagcctacaagccagccactccaacatgactcgcacggtgccccgctcaccctcgtatcgagctatgaaacttccgaacttgcctcatcacacccctcaattcaaattgtgcacgaaacggacagcatgcgtcgcattcctcgtggcgcaaccattccggcctcggccactcatgatgctggccaggttactccgaagcgcctctcagctctgtcttctgagatgtcggtcgacttgattgatccgcgtgaagctataggtgcaaggatttcgacagacacccgtagtctcagttcgtcgactgttgagatcccctctcatcctctagcgcaacctccctccccgccgatgaccatccaacatccgggatcttttacttcctatccttcaccgttgaacacagtcttgtttcaggcccagccccttacgcccgacacatccccgcgacgcaaagaagtgggcatctcttcttcgcgccctctagacatacagcaggtttcgagtgatgtgttatttaattcagaaaacaatcgttctgaccagaaccccatcatcaacactttacctgaccatgtccccttcatcttagcatgtgaatcccaggtcctcgcacaccaactgacattaatcgaaatggctgccctgagtgaagttgactggcgagatctggtcgagatgaggtggagcagtgcctgcccattagtcacaaactgggtccagttcctgacatacgaagaacgcaagggtattgatttggtcgtcggccgcttcaaccttatggtcaaatggatcctgtccgagattgtcttgacccgtgacatcaatgagcgggctcgcacaattatcaagttcatccatacagctgcgcatgcacgccgcatctgtaattacgccacgatgctccagatcgccattgctttgtcttcgtctgattgctcccggttgcagagtacgtggcagttgatttcaattgaggataagcggctgttcaaggatatggagtgcttaattcagccggtgcgcaatttcaatgatttacgcgtcgagatggagacggccaacctgcaagaaggctgtattccattcattggtgagttgcaagctcgtttgcttgaatagcgcgctagatcttgttcgctaatttttcttcttctttccaggcctatacgtccacgacctcacttataatgctcagaaacccgcacaagtgaacaacactaacggcggtctacttgtcaactttgagcgctatcgcactgctgcaagaatcgttaagagcctcctccgtctcatcgacgccagtacaaagtataggtttcaacccgtgcagggcatcatcgaacggtgcttgtggattgcttgtctccccgaagacgaaatccaatcccgcagcaaagcccttgaataatctctcatttttttttttccttacctttatccttttgattgcattcctatatccatttttgttctacaatcttgacctccgtgactggatagtttataccccctttccagaggctgctttgtccctctgccattttgtaccgatacttatatctggttaatgcctctttctttggaattccttttttgtacatacctcggctatcccggcgcatttgaccttgtcagcgctcagacatttcgggaatgcccgctgtcatattggtttaggactcgctctccaaggccccttattaatttcatgtatattttgttgtctgggtttattgtctcatgattacaggccttatacgttgggatttgggtgcttctttctgcaatatagcgtgggcttggatattatatgcctcctctatggagaacgatatatttggagcgattctgcagatgaatctcgtattggtcattcgttatcaaaccctggaaaggtgttccttcttttcacatttgccatatttatttattatgtctttcccttggctgaagctatcaacttaaggtataacatcataatatattctacattcatataatgttattatatagagggatatctgattcgacaggagacatttttgcaggttaatatgggttccttacctacgatctaaatattagctagaaatgaaattctcaaccaaaacataaagcgagaaaaacctaccaggttagttgccttcattggcttcatatcctaatattatacacctcgacattcaatatcacgaaggcatgtattacaaagctgcgtcatatctcccgaggtattcggggccgcatcgcgggagctggtccaggaacggaacaccaaatccaccgcccgctcatcaccacgacctccctccaacaaccaatttctgcgcgtggagggtaccctccttacataacatatccccagagagggccacccgatctcgtcccgaactcaacccttttgatgtcccgccacaactctatcggacagccagcccgccacgatggtggacatgaccgaatcgcggcgcggggcctcagaggaccccatcgactccaatgactacagcgaccatagccccgcctcattccacgaagctaaacaggaactcccagatgatttacccagatcactggatgatcgccgctccgttccggtcttccaaccggagactgagatgtacgatgcttggcaaggtgagtgctcttgtgtccgcggaactatttccccgtttccccgacgcgggcgaccaaactatttttccttgagcagttacatcttggaaactttactggctatttgggagttcaagcattaaggtctaatcgttcaacagggcaatcacaatacctgaccgcgccagtcgccgcaaaacccttatccttcagcctagcgctcgacgatcactcgcacgacaatgagcacgaactgcgggctcaatatgggcgcgatattgaagataacgacgcccgactgatggagatgcttgctgctcaagctgcccatcgggaagtggattcgcttactgcagatgaagagacaattgccgccgacgagaaattgtccgatgacgagaagcgcgatatactccagaaaagcttgaacatggcggccagtaatggcgatgtggatcgcgtgcggaaactggtacagggcgaggccaggacttacgtggatgtcaataagcccgacgaggagggaactgtaccgttgatctatgctagttgtttcgtgggttgctcctaggtgcaaaatatcgatgcgaggctgacaagttctaacagggtcatcaagatgttgttgctgcgctcattgccgccggtgccctcgtcgacaggcaggatcgtaaccagtggagcgctttgatgtgggctatgactaacagacacaagacgatagcgaagattctcctcgataatggagcatcaccggatatcaagtcatcatccggtggtagggcttttgatttcgctcagcccggtagtgagatttctgaatatttgcatgagaatggttacaattttggctctggtaatatcgacgatgacttctatgacgctggcttggcgcatggccgtttcgaagaagaactagcagagagcgagatgaagcgacgaatgatgatggaagagagcgcaatcaatctggaggtcgatctgtctagtctagggcttgacgagaaattcgaggtcagtttatgtcgtgaaaataaggtttctcccttgactgatttgagttcttttattacatagccgtttgatgaggatgagctcgaggaagatcagcaggaatttgtctgggataagtgcctgaatgatcaaatgtttgtctttcaggaccatgagctagagcgcattttggatattatcatcaccaacatgactccccagcggtctccatcccaaaagccagtgcctgcaaatcttctcttcctcagcgcccgttacgcgcattatcatgccagccccgagctgctcgcaacgctactatcgtctgcaatggaaaagatcaatgacgttgtagaacgttaccagtgggatatgacaatgcaagccttttggttgtcaaatgccacgcttctacttcattacctgaagaaggatgggggcttagcggaatctaccgtcgagttccagctccatctggcggagttgatcaacgagatattcgttcttatcattcgtgacgccgagcgtcgaatgaacaaagtcctggatgcggcaatgctggaccatgagaccatccctggactggaagatgttgccttccaaaacgagtggaagctgttccgcaaaaataaaagcaaaaaccccgagcctgacgagaagcgattccggcctccatcgccgcggcgacgagcacaaatctcgcctcgaaatatcacatctttactatcatcgaccctctttgtacttgatctctacgatgttcactcggtgatcacgacccaggtcctctctcaacttctctactggctcagtgctgagatatttaaccggatcatgagcacgaaacgttacttggcgcgcacgaaggcgatgcagattcgcatgaacgtttcgtcattagaggattgggcgcgcacgaacaaccgcgtgccagagcattacgaaaatggttctacaaacagcactggagagtccacaattgacgccgctcgtcgacatttagccccggtcatccaactcctccaatggctgcaatgcttctcatcgctcggcgatgaccacgaatctctcgtaacaaccctgctccaactccaacaactcacccccgcccagcttttgcacgcagtcaagtcataccgcccagaagtaggcgagaaaggcctgaccaagcaagcaatgaagttccttctcgacatgcaaaatgaccccgaagttctgtatcgcgagcagcaggaaattcaagaagacaaggcaagggtagcagctgggctagggcctcaagcagcagcagatgcccgtccaaatacaccaccaaagaatcagccctccgcagcacccacatctcctgacactagactatccccaggccccgctgctgaatcatcgcgacctacaagcatggtcgccactaggaatgaggagcgcccaggcagcggcaatagtgtcttcgtcgaccccacccttttccttcccttctcccttccaactagtacagatatgctggtcagctacggcgctggctttggtggtacaaaccgcgaaagagcccgcaaatacattcccacagtcccgcctgaggtcctgagtcgattcgatcgtggcgatgtataaaataagacagccataaggactgctttttcttcatttccccccagcttggattattgatggcactgttcaggtgcctaaagtgcgggcacggtgggataaggatggctaataaagcgataggataccctttgaaccctttcttttgcttgaggatattctggctgtggcttccgtgtaagcatctgccgatgcgtcgagtatatattctaaatgaatctgttccatgcatacatagcattgtgtgcggtcactgtggcttctatatgcataccaacataggctatggctctttgcctagagtagaataatatacgtgatatgaactccatttggacagactgctgctcgtagtgaagaggaaggagaggggagaaagaaggggggggggtttcactcgtaggtgggggacattgctccttccagaaagatgataagaccggaaaacagacacttggtcggaaagaaccaagagcaggtactcgtaaacatgaataattagagctcgctcacagcctggaaccaaagaaaagacaccgagtagacacaaaagatatcagagagggttacgtgctaaatgcgcaagagtatgttgtttcctatttgggattccatcctcccgcccaagaaagccaagaaactcttgtaacttcctgacaactgtggtttttctgaagtcagagcgttgctgcccagctggcaacatgaagcccacctccgagcccccgaagcgtacgaacgggaataatgacctccacgaggctaccaaaacaaagagccagtgtctcccatcatatcttatccctcgaccatccatagaggaccaaccgacaaaccccaatcacgctatgagctcacgtcgatacctggtcttaccaccggagatcaatcgcctacctccacagccaatgacgacttccctaaacccacagccagctggatgggaggacaggaagatgtggctgcacgcaaaaatcgaagaagagcggcgcagacaggaagaagaaaaaacacaccgggctaaagttgtactcgaacagcggcgcatcgaacagtcaatactgtcagatgctctggatgctggtgtcccacccaacatggtcccactaatctttaacggcatctataccactggtgccaatcttcaattagcggctgaactgcagaggcagtggtctgcaccttctgcgatgccccaaccgcaaaataacccgggcccagcgtcatctgcaaggcttccagttgcgccccagccgcctcagcagggccctagacagcctcctcgagcacaagctagtgagctaccaccgacggtctcaaaccatctgcgggaaacacgccatacttggtggtcggaggccatgtcgaattcacatcgagcgcgagtgataaactctgaacgagagcagctgaggcgcaagctgatagctcagaacgtagagttcgctgacaaggacctgttggatacagcctttgaacacactttcccagttacgagctccatggtccaggcccatccctctcgatactgggctagtccttccgataagacatctaggtcgcaagaaaaacgacagcaagccccccagaaagctcatcccatggtttcccaagaatctggccggctgcagctaataaacactgccagtgtcacaaatgtcccatctcacgttcacccggagcaaacaaatccacttagcccgaagcgaaaggatcagagatcgcatgagaaagtccctccacctaaacatcgtcaaaatgagacattatgctgtgaacaagatttatctgatgctgtccatgtatcgagtcccgtggaagacacaattgtaagcatcaagttggagtgatgcctaacagtgcgccactccattttcttttcttggctctaatcaattattctttcggatgttgcgtgttggtcggctttcaatgttcggtggatcagcccattggggcaaatatgtctttgtgggcgttgagggtgacgttcgagctgattgcatgcttggacctcaccttgaagagcttttgtcaatttcagagataccaaatgttgttattgttactttgatactgtggattggtcggtctgtattgttattctcacttgttcttgactgctgaatcctgcatgccaggagttactagcagcagtggaaatacttgaatggattgaatttcagctttacaaccatctctctgtactgtgaggtatagttgaaaattattagaagcgaagatgccactcggagggggcgtctttcctattcgggcaatcccttttgggtgtctgtttatgctcgctctagtagggagcttaagtaacgaaacatgtagttagaagtaaaagaatggataatcatccatgtcacatttctctggaataatcaaggttgatataaagttgtcaaaactcttggcgtgtccagtatgacattcatgaacgtcatcgctaaatgaaacctgatttttttcgtgggggacttgtatatataggaagtcaattccgcttgttaccttaactcatcttcaacctctccccaccttcaacaataacaataaatcctaccaacctccaaaatgacgaccttaatgcgcctgaagactgcattccaggcccgatccccagttacagctctctccatagcgcacactcaaacacctcgcgcctccatatgccgaggctacgcgaccaaatcctcgaatgaccccgagcaagccacaaccgatacaggctcgcccaaccgcccaatcccttccaataaagcaaaacccaccctcaacgagggagagaaatcgcctcttgtagaccgagaggggaatccgaaaaaagatattcccgaggatgtgaagaagcacaatcaggatatggagcagcggtatgataagccgtataacggtactgctgatgatggcacggtcaaacctgctttcaagggctagcttcctcggctggtatcctgctctgctggtgatccgtcccctatgatatgctaggttgtgagatggtgctggtccatcaattttcttttgggcttctgggttcaggcgcctgctttggagcgatgtatgaatggcttttcttatcactagatgtttttgcattaatcatgggttttgtattttgggttctctgggcttgtttatcaatatatacgtgtactcagatggacgagtgaaattccgaaaacacgtcgagtcgcttttagtactccgtagcagaacacagctcttcagatcttactctgcctactaatgaaaagtggacattagcttacatctatgttcatcggattcataggaagatcattgattgtcggtcaatctagctatccatgatgatgtacaaatcaaggcagttctcaggcttgtcccaaagccaatatccaccaaagataaaatcctaagcacattgcagcgaagtaatctgatgacacttcaaagacatctatgtgtctcgagaaagcataagttgaatttttttttggtctttttcgatagatttttgtgcatagacaggcagcttggccacgtccccacgtcgccatgtcgctctttcgtgaatatcatcaatgtgtccggaaagcaaatattacgttccaatgtactcctcagctcacaggcagcttggccatatcacccttaccgcccttgatccattcagggtcaaccagacgctcgcgctccgcgtacaattgtttgtaagcaccacgaatggttccatcactgacatgcgcaacctgggaaatctccttggcagacttgccatggcccataaggaatgaagccatgtagatgcaagccgcaacaatagacaggggagaacgtccggccaagtcacccatggcggtaacgcggtcggaaagggagacggaaacactggtgacctggtaaggaaggtcgagaaggttgcagaaacgattgcaaagatcgcttggcttggtagaggtagtcgcgttgtaatcgccagcaaaatcgtgagtttcgccattttccaaagcagcattatggcgctcgacattctgggtggtgaaaaacttctctagagccttatagatgcgaccaatctcctttcgggtgaccttggtcacagcgaagatctcggtgaaggtacgaggaaccttgcactgacgacatgcgatgaagatgcaaccggcaataatgacttcctgcgacttgcccttgaaggccttggcgtcgtcgaccatcttgaagagatacttggcggtatcagcgacagtcttctggatgttgaaaccgtcgcacagagcaccgatttccttgtaagctgctaggagggccttgttcgccttttcgccggactgcttgttttgcgcgcggtacaagtcgcgggcacggccagatcctccacttgcgatagaagtctccagttgggcgccgttgagcagagggttcgaggcgtctccgacacgggagggatcgtcattattttgatcgtcgttggagaaggtacgccattcagagtgcaaatcgatctcacggtccgcaagtacaagcccacaggaaccgcaaactgtctcgtgggagtcggggaattccaggttcgggggatcctctttgcattcggggcaaacgagatgggcggacaggtttttcttccaaggagccgcggcctcgggttttgtaagagaagtagccatattttcggttttcagataacttgagtatcgattgcggcaacgtcttgcaagtacttttggcgctatacggggtagatggtatttccgattataatagcgaaggagaagtggcgaatacagcttggcggctgtagtgaggaaaacgaaagcgggccagctgcagagaatccctcagcaagggaaaaggtcgaaaacgcaaaaaacgagctcaaggccactgttttgcgcaatcatgttagctcagcccaaaggaaatccattgtctcccgtatcgctaatttgtctgctccttaacctccaacaatgtcatgccaagatatactctaacaaaagaattttcattacctttcacaggccagagccctcggaaatctaaggagtcacccccagtcgtagaaaacccttcaccagtctgcgctttcttgggttgaaagtggaacagaaatctcgcctcagcttgtccagccgtgttgaaccagtcaaggtctccgcaagaagtctctcacgaaaatggggacaggctgaggaggagagaaagaagatgccaaggactgggggaggatgagggagggcaacgatgggatgaggtgaggcttcaataggcggcaccgagaaagggtccagatcgagcttagtaaataggtcacgtggtatatgatgtctccaaggtttgattggttcgaggaagtataggatactttttatatcaaacaaaccttctttgttcgcgtttgctgctctagataaacgaaatctaacgaggacaatgagacttcaactttggatcttggcagataagtgaaagccaacaataaagtcaagaaatttaaacattcctatacgggtggtctcgggaatttgtgtagactgatcggttcagagaagtgtggcctctcctcgtcttgataacataatgtcaacgcttgaatatagccttagccaactttcacttttcatcgataaattgaattaccgtcgactatttgttttgatactaaaatggagtgtggaagccctggaaagattcgggaacaacatggcccggctgagtcatctgccaagaaacctttccgaacagaagtcgtttgaacctccaacttcacggaaagacggatcagacctattctgttgagaaccacccctcattcctcatctacaccctcagccaagatgatgtctcaatctctccgggcctcggtgagtgctgcttgatctatagcaatcaatttcgaccctcgactaacgcgaaaagcagcgcaccctgttctcccgtgcctctcgggcacaggtctcggtcgctcgccgcaccttcctgacctccgctgtccgccagggtacgtaatttacctggggactatcttcaatataatcaagatgtcccctgctatatcgatcggtcgcattctcgctaacccgcaacccgccgcagccgaccccgtccaggacctgtacctccgcgagctcaaggcctacaagcccacccccatcaaggctggtgacgccgacgagcacgtccaaaagttctccgctcccgcgcctcccaagtctcctgaggaggccaaccttgccagcgaattgtccgcctacgagagccaggaggtcgaggtcgagggccaagccgccgccggcgaggccgcccccgtcgaggagagctggttcgaggaggaagaggaggcacccgctgcccactaaattcctctttctatttcatttagcaaggtctggggagatgcggggggaaggccggatttaaatgcctgcgccgcagctaatgtggccgcctctcgaggtcctgaagcttgtaaattagaccacatttttgaacgttgagacttctatttcccttgtttttcacctattctgcttttatgcagggtaggatttaaaaatccagggctacgccggggggttgttactaaagacaagtatttggtgagtgcagcagactcccggctagggtcatccgcttcaacttttcggtcaaagagcggggtttgtagtattcaaatgaagtacttcaagaaccatgataccacatagaagtcatctagatggtttgactgtgtggtggacaggtagcatgggcaaaatatgccatggaaccgctggtttacacaatgtgcattgtatggcttaagtaggcttattgccatgctcatgcaacaatcttccggtactgagtacccggtcaggcctcggaagtatatgcgtatggatattcatatgagggaactattggtactgactattaattattgggatctactgctgcaaccaatactccgtagatcaacatgtaacgaacagaccagaagttcatggcattgcaattgattctgatatatcaaattcatggctggcaaagctaaagctaccccgtaaagtttagaaaatcccggagcaaagaaaaggacgattcaagggggcgcaatgaaaacattggtcaccaagggtttgtacaatgtgattcatggtcgtacccgggaactcttggatacatccagagagaaaaacatcaccatttatagggctatctgtactccgtccctaactagtagctagggaaagtgatttactttggaagcgtcctaactatggatccaacccctgcaggggagattataggtagtggaaatagctccatactttggaaattgagttgactctaatcgaggcgtgtggaaagcgctgtttcttataagaaaacatcgccaaaaaaaatagagaattagggttgatgatgccattggatcatagcgaggcgatattctaacattccgtggccaagaatgagatacgagagatctgtgccggtgtacagctgtccagctgtcaaagcccactcggtgaattctgcctagtattatgttccggagaggatgcgattggtcctatcgcctgtaaagaccttgcgattggggctgaacagagagagcccaatgggctttccgaatcagacttgctgcatggcgcagagaacatggactcgagctgataccgtgagacagagcagtattacgcgatcatgatgtctacagagagaagaagaggaagaagtggagtcaaatagggatgtctcagctgaaaggaagcatctgattttaataataaaatgaagtatgattactcgtatggaataggttagaataataagttaaaaatgtctcgagttaattaaccaaggtaactaaatagtactttggagactttgcagacttgggggactatttggatttctccaacttcttccttcttcttctcttcttcttcttctctccctcacttcctcttgacattattcccccccacacacgcacccttctgccttttgcccggaccgcccttgggggagatatttcccgccgatcacttgctgaatcagagtggcgcccttgtaagcggctgcatagacgatctatccaccccgaaactccgtaattccagggctggatattattgttttgtccctctctacctctttctggctcgctgattccctcctaaagtcggcatttcagcattgcgattgtgcctcgtttgcccttcccagatgccgcgcgcctgaccactttgaaccggaacctcctggtgcacagaggagctggtctcttctacgctcggaatcttgggatttaaggggaaatgaccaataattcctatcaataaccaatctgccctccctttatcctctagacaatgtcttcgccttcactggagacgaatgatgaccagaagccccagctctctcgtgccgccagctataccgatcttcccagtcaaaccgcaacggaatccagtttaagacgtactttctccgattatgctgtgccgactttggcagaatcacccacaaaggaaaccgtggctgcagggaaagacattcttcgccgcacctctcttcgctccaaggacaggtcgaagccaaccactatctcacgtttcacattatcgtcggaggatttgaaggatgccgatttgaaggatgctgattcacatgtgccggaaaccagggcaccagagcccgctgcgaggccatccaagagccggtcaatgtctggaaggatcgtcagccttgcgaggaaaccatggggctcttcctcccgatctccgtcaccgtcagcgaaaaggtccaaacagcaggattctcagtccccaactagtttcagcggtcgaaaaacagaagatgatcagacacaaccttcccgcaagcgaacgatcctctataaacgcccacgccggccaatgctagctgttatagccaagggccccgaagacagtcccggctctccaaacagtccatctggcaattcgctacggcaccggtcctcattcgaaaaattcacagcatcactttctgtttcgaccccgctcttaccacctatgcccaagggagctgcggaaactgctgcggcgtatgcgaattccggcaccgaatctgcacggaaaaaggacgagctttggggcgtctttcgtggcttggaggcggatttccaaaagtatgcgcaattacattaacccttcatattacaattgctgaccagataataggttccaagccaaatctagctcgctgaaagctaacgtcatccgtacctcgctcctcccttttctcagccgccatcacctccatggctcatgcaagaacctcagaccggaagacctggatcgccgagtcaatattcttaataaatggtggattggaatgttggagatgctcaatggcaagcataaccagtcgatatcgggaaccgacagaccggtgttcctggaagctatcgtgggagtcatggctcgaccggaatggcgcatacccttccccatggcccagaatggagatgggcctacggaatcattgaaatatgcgtcaacttcagtgtcggaaacatcggatgggtcaggctcctcgggttcggatttcctggttgaatcgattcatcacaacatccgaaacatcttcattcaaaacctcctttctcaaatgggattcgtggtcgaacgaatgtctatgagacatgcgccagctagcctggttgctttttgtggcaaggtttgcgcatatgcctttttcttctgtcccggggtgcccgagatcctggtccgcctgtggagcacgcctcctaatatgttccgacgcatcttgtcagaatcagccgggtcgcgcactggaaatatgcgtgcatacacgcaagaactcgctctgtgctttccgccggctctccgtcccctagcgtttcactcacaatcccctctgttgcgatatctacgccagaaacccgaactacccttgaataccactcatattaactggaaccgcccgtggattgcacgatgggctgggcgtgacacggacctcttttttgtcttcgtcaaatacattcatattctgtacgctgagtatttgcctccggggactgaaaaggcaaaacggatattggcacctgggctgctgatagttcacgcgcaacttctgctcgttctggaggacacgatctacaaacaatcggcacaacaggggtccgaaaatccccacacagctgctgcaatcacctttgatgattttatcgagtcgccggatgcttctgcctccactcagcatcttcgaagcggcagcaacactcatcggttgatggcagagaatcgtttgattatccttctccgagacttactgtctgcatcgtcggtggaaccaaatcgagctcgattactatttgccgaatcattttgtggcataatcaaagccgcagcgcagaaaacgtctctctttgatcataatgcatgctttttgttgtgtgacttcctcgaggaggtcattccaatcatcacacgttacgcccagtcgattgaaactgaattgtttgattggggcttttggctcgatgtttgtcgtcaaatgatgcagagccacaattcgctcacggaggtacgggtattttctttcctcttctgcatctggggtacctggactgcgacagaagaaagaaaagcatctatctgtctagacttcttgttgcatgagccggtattctatcactacttcaatcactggagtccgatggtgcgagcctattttcatcgtttgttgtgttggagggtcggtcggttccatactgatccctcatcacttgactccaatgtctatgagattctttcagatcgactcctacgagtctgggagtattacatcgggttccaatctaaggctgaacaaggcatggcagctcctttatcctctgctccctgtacacccgctccaggacgaagaatcatcattatccgatgcgagaaccaattgtctcctgtcaatcttttcgtcagctttgaccgagtcgttccacccgttccctcgaatcaactgacgtcacacaatagaaccggatcgtccgactccagtggttcagatggtcaaccagctaaacgacggtgggggatactcaaggctatgtttggcagctcttccaacccacgttccggcgatggagtcagcagcagcagttctgatgactccgagaatcccgtaccagatccaccaatgactgtggatagcaaatgtatggatgaacacgaacaaactgcgacccacagtatggacgacgagatcatccgccccaaagctctccaccagccattctttttcaaattctctctggaatggatggatcgcccgcaatggcccacgaaaaacaaacgtcttttcaccccatgtctccctgtcgcatcccaattgcacgtcgagcatcgacgttctcccgagaagtcggagtatgatacagcatcagagaacccgggccagtccgacctcgagaacgatgaaccagaaccagacatcatcaccaccgaccaagatactcccacgcagcctacctcagatacccggccgcgaacacctacaaccaagaactcccctctacctgaacttccttcccagccttcttacgatcatcttgtgtccagcaaatatgcaggccgtgccctggcggaatgggcacacattgtctccgaatgtgatagctttttcgcccgtcgtcgtgacgagggcgtccctactgatcaaatggtggaaaccccaaccctaggggttgataacttccgcaaataaccaaaatccaacatgagaaaggagcccttctcatcaacacggatcaattatagactccccgtgacatgttcaagcagatgtctgttttgagatgtttcggttcattcctcttttttgtttcttctaatttcacaacactgtgtgcatggcggatctggagcatagggaatcggcgtttacttagcctgattttgttcttccaaggatttctcatttcgtgtactaggagcgagacacgcaataatcatagtaaaacatcattcgacttgatcgtccaaagaaactgtagtagagcatagtcaactagttatatataacatttctttatgtaacaagtgatctctctctcattctaaatctaactctgctgctctgcctcccccttctcctgagcaagttgcttgttcagtaaatgcagcaaaactccctgcacatcctccctatgcataaagacttcaacaagcctcaccccagatccattctgaatctgctcgctagccaacacatccttcaactcgccacaggtcctcgccgtaaaactattattcgccgcatgctcttgatcagctccgaaatagttcagcgcctgcgcgtgtctccagaaaggcacatcattgtacacctgcttgcgtccgtggatcacccgctcaatggtatagccttcgttattgatgatgaaaataataatgttcaacttctcacggatcatcacactgatctcctgcgctgtcatctgcagacttccatcgccgatgaacaaaatagtctgactcttgctttctgtgaccttgttgtgctcacgctgcgctagcgctgtgcctagtgttgccgggagcatgaatccaatcgagagccaagtgaccgcgccgaagatgcggcatttcggaggcagtttgaagttccggccgccatgcgaggcggtgcccgtctcggtgaggattatgtcgccttcgcgcaagagcgggtttaccaggcggtagaagttgtcttgcgcgagggggtctgtgtttttgatgttggccaatgtgatttcttgtttcgggggtccggtggccttgactaggcgggtggagtcgaggctttggagtatgtttgatagaatgttgcgggcggacaggtcgcgataagtatcattgtcgatttgaacggtactgcctgaaaaggcgattgacactgcgggcttggggattgtcgtaaagtaataggtgttggagtcgctattgtgcagtccgaatgccagaatcaaatctgcctcgtcgaagtactcctgcgctgacttgtcgccaaaggctcctgcgtacaatccgtacacatttggcagctgctcgttgactaggcctttgccgtacacggttgtccatgtgggccagttggttgctttgatcagagcatcgatctgctcgacgataccaagacctgtgctttctccgtccacgaagatgagcggacgcttggcactgtacactttctccaagatgcgagccagcacttcgggctcttgtgtagagcttggtggttgaggaatgctgatctttgtttccaaatttttagccgacaccagcacgtcgggcatatcatcgggcaattcaaggtagaccggacggctgtggaccaacgcctggcgcaggacatagtcgatccgttccggcgctgtggcagcgtcttccagcctcacttgagctgcagtgacatgcttcgacatgttcgcaaagcgacggtagtcgccatctgagaaagtgtggtgcataaacgtgcgcgcgctctgaagtgggcgcggtggagttccgacaatgtgtaacacaggtgtattctcggcataggcgcctgcaatgccgttgatagcggacagctcgccaacgccatatgtagtgatcagtgcagacaggcctttgatgcgaccatatccgtccgctgcataggcggcattgagttcattgcagttgcccacccagtggagaccggcgggagtgacgaaatctaatagacgaaggttgtagtcaccagggacgccgaacatggagtcgacgcccagctggcgcaaccgggtaaacaggtactctgcgagttttatatcttgagtcataatgaatgtgatattgaagttaagagagggacgcaaaacgagtatttatagatggatggaatggatccccgcatcttatcggcgacacgccgattctccgactctccgatctcgccattgttagccgacttcacccttttgtctccactggcgggacaaactccgcgagaccagccatgtcacgcctggctgcttgtgaagcctgcagaaaggctaaactggcatgcgaccatcagctgcccatttgcacgcgttgtagtgctagcaaggggatttgcatctataggactacgcccttcaagcggagaagagtcgagaagcaaaggtcagtttcatacttgcctggattgtatccgaattggctaataatatatttgcagcgtgaatccaccagataaatcgccattatttaatccaaggcgtaatccatacccaaaccctgggtatctaggatcatctagccatgcagctatattcaagcacatcactccggacggagaccatggccccggtagtcatcaagtcgcaccagaggatctgcactcggatttctttggggacaaccatcttgtcctacagggtgcagatatcctcaaacatctcttgacaacatataagttgtccgccatgaaagacctcgtcatgttctggctagctaaaggagccaatctggccctggcagagccctttgttgaccaatgtgcccagagcgtgagccaattgttcacatatcatgacgacaactggcatctagtctatgcaagacgtctcgtgcagaactcggccctaccgctacacttcaatgatacctctgacctggctagtttctcggctcaatttttggatcacaattctcgctgggaaacgttggggatattctttgccgctgttagtcgtgcgacagttgacatcgcgttctttccgtctctatatactactgagcaagagcagtacacactccgaagattgtgtactaaactttgtgattttgcattggagatatctctctctttagattgcttgaatgatctacaattgatcatgcaatacgagaactttatcgtccattcctacgtggatggagatcagagtaggttgcaagccgcaattgttacctccacttagccatatgttaatttctcaaaggctaccattcctggcgcaaactgggcgatgcaatatcttccacatttgcccttggctaccacgagaacatcgaaattaaagcaggaatcccgccattcctcaaagaattgcgcaaaacagccttcgcgcgtatatactccgcagacaagaatatagcaatattcctcggccgcccaccacgaatgaacaaacgcttctgtcactttcaaatcccatcctgcaagaatgcaaaagaaggctcagccgactggaccccagacgcggaacccgggtaccgggctgacacgcggtggtctgcactgtgcgcatcactaaaggaggagatatgggagcttcttcaagacaagcatgatccatcatgtgcgcagcgagcaaggtattcaaaagcaacgcaatgccacaccgaatatctcaaagtaaacaatagctaatcaagaaatggcacagtgtgatacagtgccaagcagagacgcagtggcaacaactgccatcccacttccgactcgagagcagcctaaagaattgtacacaaggatccttcgagcgagacttcgtcgccggtgtacgactgcaccacttgcatgtgctattcttgcttcgtcttttgcttcttaaatcaccgactgagcccgatctaccgatcatcgagacggcgggtcagatgctcacgctcgttgtggagattattctgctgcgggatcagctcactaattctgggacgggtcttatttggaaggtatgtatggaattgacttgatgttcaaattaacatactctgtctacaaaccccccaacttgcaagcagtaaactgaaattcatactaactaggtcgcatactacggtctccccgctgcggggataatgcttctggccatgttgaaacagcatatgccacgagcgcaccgtacacggtcgttacaagatctcagtgtgtttgtggcggaggttcagatcggcacgattgtaaaagcaggggacccaaattacccattgctttctaaggctacgcggactatacagcgttttttggactcaacacattcggacccagcgcagcctttgcctgaaatgaccgaggttgaggggaatgatgagtgggcggcgttattgagtcaggatttgtgggattttgaggctgggttttggcagagtttggcggatcatccgtctttgatggcgattgagccttctttgccgtctgtctagtttatgatacctatgagtaaaatatgagttgggctggaagaaggctcttcatctcttcatttgatgtcatatactcatactgacttttgacttagttttgactgtctttgtctaataactagcattgacttacatggtagtaggtcatagccaacatccacattgttataagagtgctctttcccgctccagtccacccggtcagtaggaccctttccacatacaataaccatggaaaatcatataagaagactctgaaaatgtgactcttacataatgaaatatttccatttggaaaatgaagtactaccctaagggtggagcacttggagcgagcaagcaaaccatgtggactggcagggttggaaccctttagaagctagatgatatatcccaatatgaacgccggtgcctggggcaaggagaagctagatacattcaagaaaagatgaggatgaggcgaccaatggaaccaacagaaggacaatctgctaaggcccgtatgagctcaagacatgcgtggtatatgatgggcgtaaaaagaagttcccaaaatgcaggtatagaggtattccgacaaccaagtgacaggtgtcgggctgtacagtgctcgtttagaacatgataatagaatcaatccgataagagcggatgaagtatggcggagaagaacgacaaataggaaaagggtagatagatagaatacattaatggagcagcttgtcgctggcgtggtggatggtgttagcgacccggtcgatccaatattgggtcaatgtccaattccccgtgttgatgctgtcgcggatagcagggaagatcgagggatcgtagccggaccacagctctggcccaaagataacgtgtcggaattgtgtgcggttggggatctgtacaaatcatcagttagggccgaggaatgaatcaagcagaacgtcaacttacacctccgccttcttccaagtcaagtagattggtatcaaaagcagccattcgagcattatggttcacccgctggactgccataacattgctttcataaccacccatgccccatacagtatcgtgccagattttgttccaggactggaatgtaacagcattggctctcatctcggtcgcagccctgaacatgggctgcatgtctacctcggcgttctttgatttggcaaatttgtccaagtctttgacccatccgacaatggagtcgccgtagacttctaggtcaaatggcagcatgggattctccgaaaggtctagaaggagaagcccccagaattgagccaggattttgtggtattggaaatcggggtctgcgttattaaccatccagtcatatgtttcgtagcagctgtggtatggatagggctcgccctcaaatccgaagtcaatgctcgaagtgccagcgatatcctggaacgcaacataatcacttccagcgccaagtggagtaatctttgagccctttttatcccaaatgtctttcagtgttgcgttcgcataggggtcagagatacgacccagaacctgtagcacggtgcgctcaaaaacaggcgacgcagacacacggaaatcggggcccgcaacgcccacgtcgacattcaggtaggcaaaggcatttgcacggagatcatcgatctccttctcgacatgttcggttgagccgatcaaattgtactcctctccgtcccaactgacaaattcaatggtgcgaagtggtcgccatccgtaggtgagcaactcgccgaaggctcgtacaacctctaggaaagtagcagtgccacttccagggtcaacacttcccatgcaccacgaatctcggtggttgccaacaatgatcttcttgtcacgctcgtccattccggttattatgccgtggatgttgtagataggttgccgctctatttcatcttgcaggttcatcagatgaacgatcggggagtcctggtcacctgtccaccactctggtacgtcaggaacaccgcccacccattcctttggtactttggagccatggcctttgaggccctgcaaaagtatctgtgcatcgcgccaagcaagtgggagactgggaatcttgggtagaccggggctgtcctcgggggacagacgatggttttctcccggcgtagatgcccatccagggctgagaacatcgccaattacctgcgacatcatactgacaccgcccctttgcacgccatcgcttggcatgtatcgcccttcggggaaggccgggcctttgacaaatccgtcctgagcgggatcggagtagatgatacagccggcagccccggctaattcagcagccttgattttcaatgcgcgatctgattcagtaccatagtatcggaccaaggcaattgagccatcgagtgaaattcctttatttgcgagcagctcgaaatcttcccgggatccgaagttagcatacaccagatgcccagtgacattgccggatttcgaatggccatggaagatcaggtccttggcgttgtcctcttcgagtttcgcctcccaagctagactaggtggatcgatgatggcgactctcctcccatccttgcgtgggtagttgaggtagacctggaattcctcccgcgacacttcatcaaaccctgcattctggaactcttgttcaatcaattttgatagcgcaaagctgccttccgtgccagctacgtgggtgtagtttgtgactcgtcgcaaattatcggcgatattggtctcgttgatgtggccttgaatgaagttctcgacggaggcggcgctataggactgacccatggccatgcgactgttgatattgaagacatctgcgatgaagaacacatacactaaggtgaccaccagtaaaagagcgaatactcggagaagcatgatgcacccctgatcttttaagcgtgccctagcgtcactaaggttgatcgtgaagcggaaagtaggcatatatcgttggaagggtcgttgtatagcggacagggtacgacccagactcgatagctgcttggaaaaacgatgtcgtagaggggtgtgtctgccggttaaggaggccgatgccgaatcatccacgtccatctggtctagctcccgccgtagttcttccaccgactctcggtctgagtgtgaggccaatgattccaggtcatccaggctagagcgcgccgattcgacggttggtgggtggtagccgcgggttgcggcatgatcgcgaccgagtagcccctgtcgttcaacatctgttccatcgccaaggtcggatcgagatgaggagggttgaccggtagcttcggcgtaagaagggatggggacggcctgatagtcaaacttctcgtcgcccattgtgggagatacggggctccggagagctgtaactagggtgtaacgcgggtgcggagatctggaggatcatgatctgtaggaaaaaggaaaatgagcgacgtccgacatcctatgccgatgaatgagtatgtccagaatccgatggagttgtataggagagagacaggagataggcaaacgcccccggagtgagagtgacccacgcttggcaactcggtactgcattacgcatcatttagagattgggcattctttaatgctatgacaacatattagtagattagaatattttttattagtccaaaccggtttgggagtcatttcttttttatatatgtatcagacctcggacgtgcagtgtcgtgcagatgttctccattatgctacggagtacataccccatccacgccagaagatgaagatccgagggcagtatcagaataatacaacacagcaaaggcagactgaactccgtacagcatagtagacggtataagtgaccacctgagaagagtctcaaagacttcattatagagaagcaagtttcgggctaattagctaaaacatccgaagtgatgccactgagccatcttgaggtacgaccgggaggtccattgctccactaagcaatgattcgaggatgagaaggaaccttccactattcaagatattaaaagatctcaaagagggaaagctgagcctggaagatgaccggagtggagacaagagagatcgataagatggcagactcagttttacaccgtagcttggatgttgagggttttaattttcaaagccacgtagcggattctaacacagagatgtaactatgtaactgtttattacctaactatgtgctagctagttacttactgtcaaagttgatgttgaagtggtaagttagcggggagtgttgtatacactgcatcacggggtccacgagtcacgagtatagcttcacgtccaaatctccccgtataaccacttcttatatatctcctggggaattatccggcccaaaggaactgcaagagaagtagcaaaagagggcagatctccccactcgaagaaaaaaagaaaacgcgaaaaaaaaagaaaaataataagtggtgacagatcgtacacggtagaaccgagtacacagactccttttcattcttatatcagtcgccttctcttcagacttctccctcttctcttgatcttaacctcaacctccttcatatacttcatctcagtcatcttccttcaccctcaccttctattcctcttataacacaaagttacccctctataccccccaccatggctactcgtccccaaaacatcggcatcaaggccattgaggtctatttccctactcaggtaagggttccacgtctatcgtatcccctgggatcgatgctgatttgtcaattgtagtgtgtcgaccaggtcgagctcgagaagtacgatggtgtctccgccgggaaatataccatcggtctcggacagaccaagatgagcttctgtgatgaccgcgagggtatgtgcacgggcatattccaaaggggatcaagaccaatcagctaacctttctcggcagacatctactccatgaccctcaccgttctctcctccctcatgaaaaaatacaacgtcgaccccaagtccgttggaagactcgaggttggcaccgagacccttttggacaagtccaagtccgtgaagtctgttctcatgcagcttttcgctccccacggaaacaccaacatcgagggtgtcgataacgtcaacgcctgctacggtggcaccaacgctgtcttcaacagcatcaactgggtcgagtcctccgcctgggatggccgtgatgccatcgtggtttgcggtgatattgctctgtatgccgctggtgctgcccgtcccactggtggagctggctgcgttgctatggtcatcggccccgatgcccctatcgtcttcgagcccggtctccgtgcctcctacctcacccacgcctacgatttctacaagcccgacctcaccagcgaataccccgttgtcgatggtcactactcccttcggtgctacaccgaggctgtcgatgcctgctacaaggcctacgacgcccgtgagaagaccctgaaggcccaggccaacggtgccaatggtgctaacggtgccatcgacgagtccctgacccctctggatcgtttcgactatattctgttccacgcccctacctgcaagctcgtccagaagtcctacgctcgtatgctctacaacgacttcctggccaacccctctcaccccgctttcgccgaggttgcccccgagctccgcgacctggattacgagaagtctcttaccgataaggtcgttgagaagaccttcatgggtctgaccaagaagcgtttcgccgagcgtgtcaaccccggtctccaggtcgccacccagtgcggtaacatgtacactgccaccgtttacggcggcttggccagtctgctcagcaacgtcgctttcgaccctaaggagcccaagcgcatcggtctgttcagctacggttccggacttgccagctccctgttcagcgccaagattgtcggcgatgtgtccaacatggttgagaagcttgacctccagaaccgcctcaatgcccgcactatcctcgagcctgctgcatatgatgccatgtgcaagctccgcgagcacgcccaccttaagaagaactttaagcccactggtaacatcgagactattggatccgatgtctactacttgactgaggtggatgacatgttccgccgcaagtacgagatcaaggcttaaagtttctttgatgttctgcgattgcctttaccgttcaatgtgttgtttagacggttcaaagagattcccccgagcgttttgagtgtttcgtcaaggtgcatagaagaccttttttcgttttccttttttactctttcggttaggtcatttcgacccacatgaaatgaatgtcatgaaataattaaaagacaaattaatgagatacaattctaaaataactcggtactaaaaggtcgatattaactacacacaatgtgcactaacagcagtgaaacaccgggggtcaatgcacggttatgggttgaccaccccgatttaaccacctcgatttgatctcaacctctttctaggtgtctcctgcatgaactcctcatcaactgcattaatcgttgctaattatgggacattgcttagtttcaaggatcaaactatccaatcactggatatgacgccaggtgcccggcgcgtacatcaaactcatcaccacacatgtagccgccgacgtcgatatcacattcggccactggtgcatctagagcagctactctcccttcaaagggtctttttaccctgctcagaccatggaaccacacatttcataaccccgatggctatttttatccgtttgctttcttggaacccttaaccgctgaccccgcgagtcctgaagcagaaaaagtcaccaacaagtctgctaattaccctgcaatgtgacctaattgttgccgtttttagaacgcctcgagaatcttgcagcaggctaaccatttgaggcaatctgaagaacgatgttggagaaaatgcaaaatatagtaacatcttaacgcgcgacagtccgatgaaaccgcactataccggactagacccccttcgaggggtagtttcaagggcttgttgctcaacatgcctgtcttcaggcacaatgtcggcagtttcgtgtttcatcgagtgggtatgcctctgatcggagactaggatcccaaaaaaagattctcaaggcgttacaatggggctcttctccatgtttcatcttttctagatcgactagggttcgtccgtcaatctttttatatacaccatgcttggctgtttgagactctgtcgatgttcatttaacatccagacatcctccttctgaatcatgtctctgtgaacgacttggtcagacatcagatccttattcgtttgttactcttatgatatattgtttcggtgatatacctagtcaacaacttcactatcatgtctgctgtcgattccgctcgctttcggctaacgacgccgccgcgtctttctcttgaggagtacatcggctctggacatagtcgtcatgtctccaactcttccgtctattcaagcgagtcttctccctggtcgactatgactggaaataccagtcctaccacctcgccaactagacattatcatggcccgaagctattgccaaagatcaggcctcaagacgtcgtgattgagccagtgtctgctggcgggcctcttcgtaaccgtcgcgttctctctaatacacggaacccgcctcctggattcatcccttacccactggtgcggccatctgtcaaccgcacacaagatgtcgcggaccgcttgacattggcctctcccatctcgccggccccaatgactacgcagggctgcttccctgccttgtcatcgcccgtgactatcaccccttcgtacaagcgcaaggcaggcgggagccactcacgctcagtatcggcatctgtcatcgatgccgccactttgacccgatttgggtatcccacctaccgggagctgccaaaatatgcgcctcaaatgcaggcccagacgaccccgaccaccccagttacgccaattaccccaaacatcatgccctatccatcatattctcaaagactgggggtgcagaatgctcctgcaactccactgacagtgccgacacctcaatataactaccgccacgcatcggctgctcagcattcaccggtctcgctcagtccccaggagaacctaaccccaaggtccactactctactgtcatacctgaccttaccaatccaaccaatcaatctagtccgcaacgttagcgtaattcctactcgcggtctacacgattacttctggtgggacatccgtaacctgcgcagctggagctccttctcactggcggcattcgactccctggatagccgactaattcagctcctgaagaccgaaatcccagcagagctcacaccgcacgtggcggtatccccggcaagcctagcgccagaatcagaacacgacctagtgagcctaatccgcgacctctacgcaccgcccgtaaacgccgccctagccgtctcccaaggcgaagaccacctccaactctacgctgccccagacgtgcgcaacacaggccaaaaaaaccacggccatccgcacttcctagcaaactatgcctcagacactgagcaaacaagcgccggtctcccgcgcggccgactagttggcatcgtgaaaagcttcgaccgctggaacaccggcatgcgcaacgaagccccccacaggcgcgtaaagtacctgaacggactcgcccacctgcagcggtgcatgcgcgagcactcctgccgctacggttttataatcaccgagatcgagctcgtctgcgttcgagcaggctgtgacaccggcgacgacatcccctactttgggtacctagagatcgcggcatcaatccccctcaagacagcagctacaaggagcgggcgtgcacacgcgcgcgatgcacctctcacaacacccatcagcgcgcgctctttctcgtcgtcattcccctcgcatcatgactcctcggacccggacccggttgaggatgcgttaccggctatgacggcgggtctaggcttgtactttttgttgatgctttcaaagtcggtgccgcttccgcatcagccttctgctcatctcaacgttggcggacctggtgcgatgactcgtcagaggattttggaggagccgaaggataagtggattcctgagccgcaggttggagagaaaagggatgctaaaagagtgagaggctgggtttggccttcggatccttggcatcggagagaagggggtgcgtctaggcggaaggctggcacgaaggctggcgcgaagacaaagaaatggcataaatgactctattttctgtaggcacaagtttggcttttatgatggatgtttgggatttaagtatattttgtttcgtttctcttgttgcttttcttttttggtggtttttggtgcctgttattcccccctgcaaatctttcctttcatagtaatttaatttcttttcttcttctcgtcttgtctcatattgaccaatcaaattgggcttcatggatccgtcatgaatatatattggaaggtcccagggtttcaattgaattcaatttcttaccttgtttcatctccgctccagggctcttatggatgtacacagtggccgttatagagctgttaatgcttgccgtaccatgtctaatgtggcttaattgggtggaggttcgaacaagaggccaagcgaaatcagcaacattaaggatttgtatcggatttggtgcatttttttctctggatggaattcatggccattgatgcttatattcacattgctagatatggcttgtgtatgtatgtccaacactacatggaaatgcttaagtataaaggccaaaatgattcaagtcatccctaaggtcctcaaagattgactccaatgtgatcaaatccgtgatgttaattgtggagtatgaagctgtcactatatgttgtcatccctcaaggaccttggggacaagtacctcgatagtcagctcacgaggacattgtagaaatatagtcatgcccgtagaatataggctataaagaatagtatttctcctatgatcgtacgttcctgcaaatttactattttgttgtactactataatcactacatttttctcatacaccataactctagccctacctcgcctttctaacatgtcggtatcccaagaattaccagaagacgatgagatccgcgatgtaatcatcatcggtgcaggaccatgtggcctcgccgtcgccgcacgcctaagcgaagaaacaccatcagcagtcttcacagacgaagaacaccagcgctatcactggataaagaagcacagcgggcggatgaatctggtccaaggacgacacggtaagattaagggcgtacgagccgcaaaatgggatagcgaacgccgatgtcctcgtcaagaagacccgagacgtacctctgaccctgcgtctcctgtaccatcactatcttccgcatcgtcgacgtcgtcaacatcctcgacatcatctatctcaactcttgtgctggatggctctggggataaatggatgcagcggtggcacaatgcattccgcacgctggagatcaaacagctccgcagcccgatgttcttccatgttgatcccggagatcgggatggtatgctggcttatacacaggagagtggacgggacgcagatctttgggagatttctgggtgcgttgggaaggagatgagtaaacataagaagaagaagagaagacagggtgggcaaactcagtaagtggtgtccagtgcgaatgtggttgaaacaaagctctaaccatgggatccttgtaagcagaacaattggagctgaaatagacgaacgtgatcggaaagattacttctcgccttccacagaccttttttcggattattgttcgtcgattatccagcggtatgctctggatgagcccggtaaaatcttgcagcgtgaggccacggatctctcgtatgattatctctccgatagttcaacctcaaagctgttcactgtcaccacatctaccggagagaagttttatagtcggtctgttgtcctggccatcggccctggcggagcaggtgtatcgaagatttatccgtggaaaccctcgacggaacaagagggtgctgcagcatgttgtcacagtacggagatcaaatcatttcccagccccaatgtacagaacaagatccagcggcgacaggaaaccaatgttgttgtcgttggaggcgggctgtcgtcagcacagattgtggacatggcggttcgcaagggtgtgacgaaagtgtggttcttgttgcggtccggcatgaagggtatgtataacatccccggtaatcgttgaattttggacaatgtctcatttgaataatagttaaacacttcgacattactctgtcatggatgggcaagtacaaaaactgggagaaagcagccttctggtctgctgataccgatgaaggtatttgttaaaaaagccctaaaccaatctaaagactgacactaatatatttctcagagcgccttgagatgcttcaaaccgcccgaaatggcggcagcattacaccacgctacacaaagattgtaaagcagcacgcagctaaaaaccgcgcctccatccacccttgcacagtaataaaaacccacgactacaatccagtaaccaagacctggaccttaacaaccgacccaccaatccccgacctccctgcgatagactacatctatttcgcaactggagtacgggcggacgtgcgcgagatgccgctgctccgcgaaatgaacgataaatacccgatcgaggtcaagtcaggactcccatgtctaacgaatgatctatcgtggcgggatgacgtcccattattcatgacaggccgcctggcatctctccggcttgggcctggggcgccgaatctcgaaggcgcgagggtgggcgcggaacgtgttgcgtggggcatggaggaggttctgcataaggggcgggatgttggtgggcagtgtgagggcttctgtgggcttggtaatcggtatgcttcgctgcttggggagtgtgatgaataaactttttctcacatcgttgtgaaggatggtatcataatgcacaatatacttgttcttttggactgcagatcatacttttttggatctgtgacgaggtgattggagatagtacgacatttatgctggatatgtacattgcctgctacattcctccctgcattccgtgaatttacgtttcagtcgccagagttatccttgactacccgaggatactacggggaaggctggaaatttattgggtcagaagaatgctgttgatctcttgttctccaaggctgtatactttcaatataagatagctggtatagcaacatggggttgagttgagtctatacggttcgacttcactttttctaggaagcccaatatttgctagagcatataacatggcgacaaaggcagatacattggagaaggagccccctatggagatattcaagctcctaccgaacaacacaaatcctaattggatcaaagatagggggctccgtaaattgaatttggctattgtgttcatgttctccagtgcttcttcggctgggtacaccgcaagtcttgtgaacagcttgtttgttctacctgagtgtaaagtctccatcccgatattgtgatatttatgctaataatgacatagttggtgctatcattggcggactagaccccaatatagttggtttgataattgctgccacttcacttggggcgttagtctccttcgcaccggcctcttatattgctgatgcattcggacgaaagacgtgtattttcattggggccagcattgtgatcgtgggagctatcatccaaaccgcagtcaaaagccactgggccttttttggcaccagagtcttgtccggtatagggatgggcatcgcccagactgcatccccactcctggccactgaaatcgcacacccacggcagcgacagacggccacggccctgtacaatgcatcctggagttttggcgttattagtgcggcggcggttacgtatgcaaccataggaatagcaaatagttggtcgtggagacttccttgtctgctgcaaatatcgttcccgttgttttcgatcctaggattgatcatgtttgtgcccgaaagcccgagatggcttgtgtccaaaggcaggaaagacgaagctctgagtattttggggaagtaccatgcgaatggagacacagacgacgagctggttcagtatgagtaccgtttgatatgcagcacgatcacagccgagatcaccaataccacggattggagctccttcttctcatcgagaggcgatatgcaccgattaaccatctgcgtattagtcggacttatgcaagaatgggttggaaatggtatgtacaacgccctaaaagagacttagtcactaacggcatcgcaggcctcttatcctattacctcgcaccgattctcgcatcagtgggaatcacgaaggcagccgaccaagctgctgtgaacgtcagcctcaatgtctggaacctcctccttgcggtagctggtgcatttgcatcggaacgatacggccgccgcattctatggcttatttccacgggagccatgatcgttttcctgtccatgtccacactggccgctggtctatttgccgaaaagcatcttcctgctgctgggatagcggctgttccgctcctgtttctcttctttggtgcatacgatatcgcttatgcgcctctcttcatatcgtatccagctgagatcctgcccttccaactgcgtgccaaaggcattgctgtcaccctttcggtggacgctgtggcgtgttttttcaaccaatatgtcaacccagtggcgtttacggcgattgcatggaagtattattgtgtctttcttggctgtctgatagtgttcctgggtcttatatacttactcttccccgagacgaaagggcggtctttagaagaggttgctatgattttcgacaaggaaaacaaatcagagggtgagagagaagaccgacaagatacagatataatatagatagtggccatggtggccaatcaaagcctggctgatgttgctgatgtttcccccgcagttgcaacgcgcagttacagttacagcgcgtgtaaattgcaacctctcgcgctgaacatttgttggttatatataactatctctactctttgtttagccctaacaggataaatagaccttgtcagagtcgaaaatcccctcaattattcgtcatattgtcatgttctagatccaaaagctccaaagctatcccaatatttcaaccaaacctcaaatcaacatgaaagaaccaataccacctcccacggcgagtactcccagctactccttctcaccatcgaagcaactgcgattccttgtcatcggcgccggctctcgtggaaacgcctacgcccgtgcagtcacaaccgtaacaccgggtgtaatccacgcaattgccgagccccacgcattcaaacggcgcgagttcggacgaaaatatatatggggcctatccaaatcccatccagagcctcaagagggccaggaattcacagattggcgcgaatgggtgcagtgggaactggagcgacggaagcgggcgactcaaaacaatgaggataacacagcagacataagcccaactcccgtgggggtagacggcgtcttcgtctgcacactagacgaaacacacgtcgagatcctacaagcccttgctccgctccaactacacattctctgcgagaagccacttgccctctcgctggacgactgtctaacagtataccgaactctccaaccaccagaaggcccaaacaacaccccccaagccccaaagaagatattctcaatcggccacgtcctccgctacagtccgcacaacatcctccttcgcaaactcctcctgacagaccgcgcaatcggcgacatagtctccctagaacactgcgagccggtcggctggtggcacttctcgcacagctacgtccggggcaattggcgacgcgcaacagcagcgggcgacggttccctcctcacaaaatcctgccacgacattgacttcatcctctggctcctctgctccccaccctcacccgaaacagcatccaaacaaggccacaagccgcacttcccgcgctcgatctcgtccgctggcacgatgacgcagttccgccaaaagcgcaagcccgtttccgcaggcaaagctacaaactgtctctcctgccccgctgaaagtgactgtaactacagcgcggttaaaatctataatgaccaccatctcgcgacgggtcatacggcttggcctgttgacatcgtctgtccggatatcgaagatgtgttccgtgcccaaggcggcaaggctgccgagtcgctgctcctatcctgtcttgccgaggactatgaccgggatacagtgtcggactcggatatcgctgtgcgaccttggtacgggcggtgcgtctacgaagcagataacaatgtctgcgatgatcaggttgtgacgtttgcctgggatgatgaggagacggtgccgcatcggcttgctaaaacggcgagtttccatatgattgcgccaacggagaaacagtgtgagcgtcggggccgggtgtatggtactactggcgaggtttcttatgatagtacaactattactgtttatgattttgctacggcgaagacttctgtttttgatgtgccgaagccaccaccggggcaggtcgaatcgcatggtggcggagacttcgggcttgcgaagcagtttgttagcgctgttgaggcagttgagggggggttggatgttgagactgcacaagcaaggtttgttgggtgttcactcgaggaggcggtgcggagtcatgctgtcgtttttgcggcggaggaggcaaggagggaggagagagttgttaagtgggagagctggtggggagagaagttgagggtttctgctgctgcgtggaaggcataattacatagatgggtttgatgatttacaattctacgatgctacgattctatgatacttttgtttgatatctggtatagtataggggacaataatgcatatgcttcattagcttcatagacctggaggtaagccaagacaaactcggattataataaagatgcagttcatctcatgccaacgtatactcttctaatctgatcctgcttttcgatcatcattcttctcgcgtccagatataactgcaaaacaattataaggtgattcccatccagcaggttccacattgaccctaacaacctaactaaacttaggtcttaacgtcaggctcctcgcggccaacatactccttgaacttgagcagagaaagcgccagggagatgttatcagccaggtattcctgagcggtgagaccgaacttggacttgtcggcctcgtagcgctcaacgtacagacggatagtagcaccgctgctgccggtgccggacagacgaacgacaatgcggctgccatcatcaaacttggcgtacagaccttggttgctggagacgctgccgtcaaggtcggtgtatgagaagttgccagcgtcaacgaccttgcgaccggcgatttccgagccaacgaaagtgtcgcggttggcaaccaggtcggacagagtgccaacgaccttgttggcgccctcgctgtcaacgttctcgtagtcgtagcgggtgaagaaggtgcgaccgtatgtctgccagaactcgttctggatggagccaatgctaggggtctcgttgggcttttgcttggcgacaccggcaacgatgttcaaccaggccacgatggcccacaggccgtccttctcgcggatgtggttgctgcccgtgccgaagctctcctcaccgcagatcgatatcttcttgtggtcgaacaggttgcagaagaacttccagccggtgggcacctcgtagctctgcagaccttgagccttagccacgcgatctacggcaccggaagtgggcattgagcgggccaagccgtatacaccctgcttctggaagtacgggatgagcttggcatggtgggcgatgatggccaagctgtcaccgggggagacgaaactgttggcaccgtagatcatgttacggtcaccgtcgccatcactggcggcaccgaagtggacgccgttcgcatcgacggcctccacgagctcgtgggcgtacacgaggttgggatcagggtgaccgccgccaaagtccggcttcggctggcagttcattgtgctgctggcgggcagaccgagctccttgacgaagatatccacaccgtagggaccagtcacaccgtgcatgccgtcgaacaggaccttgaagtccttgtgggagctgaggaactccttgatcaaatcgaaatcgaagatctccttcatcatggtcacataatcggcggtagagtgaacgatctcaacttcgaggggaccgtagttcttggtgccaatggtggaggtatcgacatcaggaacatcgaggtatttgtaggaagtgagggccttggcagtctcgaagatcttgttggtaatgccctcgggggcgggagcgccgttggccaagttgtacttaataccaaagtcgttctcggggcctgaaagtgtttggtcagtctccagcagatctcgtaatactcccgaccatcacttaccaccggggttgtggctggcagtcaagaggatacctccagttgccttccgcacacgaatgaggttgctagcagccggggtgctcataattccatgctgtccaatcaagatcttcttaacgccataggcggcactgatctttgcgatcttggagatgacctcggggttgtagtaacggccatcgccaccaatgacgaggaaggaaccctcaacaccctcgggaatcgacaggagaacactagtaatgaaggactcagagtagttgtcctgctggaagaccttgaccttcttgcgaaggcctgagctgggagcaagttagctagcagttcaattgtggggcaacgagtaacgtacgttccaggcttctgatcagtgaagggctggatagagactgtctggacagacatgatggaataagattggaggggaagaggtacttaggagaataggagaagaggggaagaagttcgagaagttcaccgacttgttgagctccacggagaggggccaacgtttggcgtcatgtgttgatcattccgctagtactcttgtagtactttgccacaacattttaatctacttcgtatgtactctgtacagcccaaggctctgatttgttctattcagtctaatctataagttgttcgtcaagttactcttagaaattgtccatcgcaggtcattccggcgggggaagcaagagcctgcgtcttgtacaacaacattattccaaagtatattgtacactgtatggagtcttctcacattagggaaatgtagccgaaaacaatggacaagttcaacatgcagagttttaaactacttcccagacatgtctcagagtaacagagaaaagcaagccaccaaatcagccacaccatcacttaaacagcttctctttatagaaccggatctcctcaatactctcaagaatatcatccctagcaagatgaacctcccgcttaggcgggacctgctcaagcagttcatcactcccccatcttcgcgccgcctccttcaaggaactaacatctagtatgcgataatgcaggtgatccagcacctgcgagtacggcgtacaagcaaggaaagccttatcggcgtgaacactgttgcccgcgaggagggcagtgcgcgggaccgggacatgttggcggatgtaggcgaggagcgagtctgcggcggtggagggggaggtggtcgaggcccgcacggcagcggtgaggcccgtgcggccgtgtgtatcgatgcaccactgcgacatcgcgtcgagggcggagtctgggacgtggatgacggtttcaaagccggtcggttcgaggaggtttagttgggcgtctgtgatgaaacagcagatctggatgattttgtcggtttccgggttcaggcctgtcatcttgtgaatggggttagtggtgagaattttgaaatgcgctgtagcagggtttggatcggagatgggacgtttagacgtacctcgcagtcgatccagaccaaagggtctgtcgagcgttcgagtggcatcgtggatttgtagcggataggggctcttcctggctattgaagctgttagtgattcgaggttcaattggggcttggcagaatctctctgacttggtggagaaagccgggctggaccagaacaccgcggaatgcagatgcacgtagaaagatacttctgagcatggatgtgtagttgaggagtttgaaataggtagatttgtctcagctatagcctacggtttagaagcttatcggggtttaagccggtctagtaaatgcttgacaaacgcagtcagacggacaccggaaaccttttaaaatatacaatctacgatgtatacagtgacttctctcggcgtacaacgcctagttcagccttaaacccatgatcaagctgccctgatcggtgcagcaaatgtatttctccttcaacatgttccctgtattgtaagtagtggacataacggcgtaattgtagaaaagcaatatttatgaccatccagaagacccagtaaatccaacgaagatcccgcccactcgcagaatcctatctagatccataggacgcagcaaaaacgaccagtgctttccaaagcgaagagtagtagcctgtcaggcccaacggctcaagcgagatctcgacatcagatgtaacctattttcgacgatcacagaattacaactcctcatcatgttctgggggcccagcagaaagatcaggcgtaagactgaacccatcaccgaatatcttcggactggtgaaagttgattccgttggagcggaagagcctagagtttcattgattctaccggactctgcgatccggcgtctaagggcattctcatctgcggtcgagacactcccccgctgttttttcagtggactaccgaaaaggccatcttctggttcaacggctagcagagacggctcggtgaggtgcccacctgcagatccagctgcggcagcctttggcggtgtttctgagcgctgttttacaggaggcgtagatccagttccagaagccggcgtatcggcagagtcaccgacactgcctccaggtggttcggcggagtgctgacgcttgagctgtgatgtcgttagcagagaattcatagaatgttagaatgatacctactcgaatctttcgcaggctctccgccagctctccctggcgttgaatgtcatcgggagagaggaaccgatcgtcatccttggcttcttcgtcgtctgccttgccaagtatggggttgtcggtgtcgtcatcatcgctgtccatatcgtcgacgctcttctttcccttccgcggcttggcttcgctgtcccggaaattaaggaatccaacagagccaccaggtttgatagggccgaggtttgcaatatcagcttgtatggacttgcgcttgctggcagcaggcgtctcttgcactttggcatctttcaagatacccatcttttgcaattgacctatgttgatgtaaaattagcaaccattcccatcaagagcgatccaggcaatacttacgctcaccacggtacataaaagtgaaaacagcgtatggtttatcagacgggtcaataccagtaacagtctgcgtactaatggtctttgggtcgagtgactttggcttcgcgaaacttgtggtatggtcaacatcggcgtctcctccaccgctgttatcttgaccaccctcctcatcgtcgtgcgcatcaaattgcggggaatactcgccccgcttgatctctcccgatgccaaaacccggaacaaagcaaccttaatctggcccgccgtctcaggaattggatcatcgtcgtcagagtcggaggagaggtcatcatctgaaacatcctcgaggggcgacttctcgtcatttccgtatcgcataatactcttggacttggcgggatggttgtcctccatttccatgacggtcgggtcctcgtcagcggcgcgctttgcacggcgcttctccatcttctgtcgcctgcgttcaatcttggctgctgcatccttcccttccaggtccagtccgttaagccagcgttccagaccgacctcgcggaacaagaactcgcgctcggcaattcccccgccttcgctatccggaacgctgacccagcgtgaattcacccaggtctcttcccctcgtcgcagtagtgtagccacctcctccttttgtcttccgtcgaagtagatgtatgcagccacggtctcgttcgccgaatttgtcaagccctggtatggtgcgaccgtcccggcgatttggcctgattcaccggccaatttccctgccacttttggtttcggccaggggcaatctgctgtcggctttggggtcgagtacgggacatcttgctcggggtttaggagggtgacggaaatggcgaaggttgattgttccgctttgccggtcccagatttggggattttgggtggaggaacggggataaaacaacctatgcgcgaggctcgagaatggcgttgaatggaatattcggggatcgggccatcgggcgtgtgaatgctcacggcaagccctttgaagcagggcatggtgggaatgggttaagtggaatatgggtgttgcactgtggggagaagactccaataaagacgcagggccagatctgccccgcaactaagacagggatacttcaggcaaaaacacgaaaaaagtgacgccaaatggaggataggcaaacttctttcttagtagtttttttctcccctccctcgtggagttgaaagaataagctataggtgggaggcggtcaaggtagtgggtttccacttacccagcagcccacagcagttccttgagctccactgcagctgctggtatgtttgtttctgggtttcaaaatggagggtcacgatgacgggggggtcataaatatcctgaggagtggtttgaacacacgacaatatggcttccgggctcaaataagcacataagacgtcgaaatgcgaacagaggaatggaagtaagaaaagtagaagtgagctctctcaaggacaaaggtgaggggcggaagtggaccaaaacatgagcgttgccatccccgaactcccacgtgataatacctatcaagcctatagtagcctacagcatgcctacttctctagtcatcgatagtcgttgatggtctatcccatgactctacctggtgaaataccacgattcgcacctatttatctaccaaaaccatcccagtcatcgcaattataccaacattcaacttgtccaggtcatatctccacatcagctgatctcccagcaaccatggattctgcgaaaccgtgtggagcacattttcccttctttggggttatcccgccgatgggagtatataccctgcgaaatcttttatcttttctaatatctagagagggtcaagtctttaacaaatctcatttgcattgtttctcaattgaatattcaaagatcgggagctagatgcaacccggggaacaaaaaccgcaatcggaatcaatccgagtcatgttgaccagaccgatttacgactttccgtggtcagagaaaacactctgcctccgcgacaagataacatcctcgttagcactcgcaagatggtcaaacttgtagagaggctccagctcaacattttgacggaaaatgtagcgtctgaaccaatacggcagcgccttggtgacttgatacttcatgtggacccgagtagggactgcgaagatataatccagttcttcaagagtgcgctgcttggtttcgggaacccagaggaaaatcatgaccatggcagttacgttcagaccactgaattctaccgttagatatttggtgagaaacttgcaatatgggtagaaagacttacgcatagaaggcgaatgccccagtggcagtcattgcactcaacattttggggaacgtgattgagagcacggcagcccaacctaggcaggttgccacggcccaggacatgccaacctctgataccaatgttagttccagaaacaatattaagggaaaaggggaaccaaaagtgagaaacataccacgatgggaaagagggaatacctccgccgaataagtgaacggcacgggtccttcaccaggcgagtaaaatgcggcgaataggaagacaaagaaggcgatcgaagcgagatgacctgtaccctcgggggtccagaaacagaaagcagcgccaagcaaagtccatgccatctgcgggaaagtgaacaacaatagagtccgacggccatatgtatcgatggtccagatagcagggaaggcgaacacaaagttaaccaagccgaatccccaggaagcaaacaaagcctgtgtatcatttgcgccggcgttcttgaagacagtcgacgagtaaaaggcaacgatgttaataccgcacatctgctgagcgatcatgacaacaaacgaagcaagagtggcacggcgcacacgaggaatagtgaagagctcgacgaagcgggtaacatagttactattgccgattaggtccatctcgatcttgatctgggtatggatgtagtaaagatcacgggcggcctgcaaaggtgtgttacggagacggcatagggaccggtaggccttgtccatctcgccacgtcgaatgtaccagcgaggcgactctgggcagaagtaaacaccgaataggagagggatggctgggatgaaggccgatccgagctgcagacgccaggagattttacctgtatccttgacagcaaggttggcactaaatccgaggaaaataccaaaggcggtccagagctgccaggacatgaccaaaccaccgcggatgacagcaggagtattctcggcgcagaagattggaattgtcgaggccttcagacccattccaatacccaggaggagacggaccacaaacaactgtatccagttctgggtcaccgcagagccaatgggagtaaggacacagaagatagacgcgatgaagattgtaccgcgacggcctaggatccgattgcaggggtcggagagccagcatccaagacaagcactagcgatatatggagcagcattgacgataccaacgagccacaagttccgattggcgtgagcactcttctggggatcttctgaaataccaaaagcatcggggaatgacaggttagcaccattggagccagtctggtcccaacctctgtatttctgttagggatgtacctagtgtgtgtactgggggaatcacatactgcacggctgcaccaatagagcacaggacaatggtgaagtagagtgatctaggctggcgccatttgtgagccacttcgtcacgtagggcagtgagctctagctcagtcaagtctgccactgtctcgaactcggcagggtcacgcgcaacaagcgctccttttttcaactcaggtaggatgtttgtgacgttgtactcctcagcaaactcttccacgttgcggagtacctgagtcttggtcaagtcggccaaggggttcttgatcctggttgatgttggtacactgagagggaaaagagatatatgacaggagaatgaaatgagtgaactttacctagcggtaacattgttctgaaggtcaacttgctcaatgtatcccttctcggcgctgttttgatcattgctggaactattggaactgagatgagcattgcaaagaacataaggaagatccaaatcttaccgctggccagaatcgacctgagtgatgacctcttgaaccattttgacgattgcctggtcaagctgttgatagaaactaagaaagaaaccagagactgtggctgagctggctcttttgatggaaaaggggaacagatgaaggctgatagaggagggtgatggagaaaggatggtagaagggtgatggagaaagggtaatagaggaagggtgatagagagaaagagttggaaacccaaccaacgatttcagttaccagactagttcgtttgatagtgaatcaggctccagagacaaacaaaatcgtgaatggtgactattttattgaccttgggggaggggcaccttttatatccattgaatcttttctcagaccagtccatttgaaaaggtgcacaatatcattggctagaataaaagatgtcaaagcctcacgagtgaagctccaaggaacgactttctacttcccgaaacggaatgaatctggggatccgcatcggattgcccacggggaaactctaaagtctaagaaaaatggagacaaagccaataccccagacttggtctcggcaaaatactacattgaaagtgctctgctaccttggtgaacaaggctctcggcccaagcacaactacatgcagccaatgatcctccaggatttgtcgcttccgatcgggatttctgtccagaccggttcaaagtcgaaaattaaagtaagccttctaccgttaagccccaggtatattctctttcaattatgcggtacttgtctccatgttatgcaatcagatcttacaagcccatccataattcctgtcggatacagatatgaaaagtaattctcgcgaggtatcagggtcgccgctctcgatattggcgtctcagggcgagcgccacattcgcctctagacaggggccagaattgtgattggcgaaaaggatttaggcatatggctgagagccagtcattttttggcgctaaattaggcttaaaccacgttcgggcctgtttccggcgacttcacagggctaagatgttcacgtggtcggcatatttgcctttgagcccgcatcgagacccaagtcccctcggttataacgactataaaaaatgacgaacatttgaaattgagacattttccgaatccagtagagagagggagagggaaaaagtggaaatccggggcaatgcgggggatatactctaagggcagtctatcacctcggggatgaatttccctctcggagcccaaccacggtatgagggaaatatcggaaatggtactagggtttcatttaatcccgatccctagtcaagttatcccggtccccttcaagccgtgtgccccataagcgttagttactggcattaaaacaagtagccccagacacggcaattattccaacccgataagttagtcccggaacatggcgcgctgatcctaaagcggcacattgaaagatcatcgccatcatcactcaatttactgtgaccgcccccggcgatatctcgaggttcgagcgggccgcgtctagggttgcatcgtcaaggtgctcgtggctggccatgtggagatcaacgtgttttatctggggaaatattttgatatgcttcggtaacctctcaacgccccatgcgagtcatgacatcgatttgtggcaaaagaatactggctacatcctttcttgtccattttcggcttgtcctgcaccgttcaaagtattttgtgtttgacatgtcagatgcagaatgccccttggcatattagttaattctatgagccaaatcctaaactagctcttgatgggaagaatagcatggttacattgccgatcaggcgtccaagcgtagtatatgtaccatgtgccatgctagatcctgggccatgctatcccgtatagaagagcatctgtccttccagaaagggatcgcccttgcgggtgcctgcacaccctaccatgtaataaactgtcgaattgcatggccaatgcatccttaggagagcgtctgtgtgccctgctgcaaggagcaaagcaaatacagaaataagtctccaaaatttctccatcccattgttctcatctacaatactcgcaggtgggatgttatacccactttgcttcgtgcggaaaacagcttcaaaaagtcgaaaaatgtaagttaagagtaaagtaacaaggccaacataccacttttataaccgcccaaggtaggtcgatgcagtttttaaatgtgaaatcgtagtgtttgaaaagaaccgcttattcttcgacatcgaatcgggataagctagtaaccaaattgctttttcctgatggaagtgttgccttgagccaaacaaagaaaatgacagtaacattttcctccatgtaaatcgttggttcctgtacatgaataaaagcctagtcaacgagagctcaaaatgaattatctcaacaatgttgcttttgcagttcctcttggattgaatagcgcgaatctcgacatggtcagatgtatgttaccttagcaagattgcatatgttatatatatctgattatatctggcgatcgaacttttccttttccgatttactgcttctcgttgagtgagaaatgagctaggatttgtctctatcttccgataggccagttagaactcgcagcgattcgaaatgtctcgaggatggcctcgagctgatccgcgagagaaaagatggcaattgtgctgccgtgcatgcgtacaagcgcttggtaatcgaagcaagggtctaccatctttagtctcctcgcggagggagtttcaataatcgtaacagtcgtctctggagaagtgatctgaaatagacctacggccatctggcagattagatagaacttcccattcccctcaaagatccccctcccacatgtggatcaccatactttggtagcacagcatatttgaggttcatctactttgatacataatgaccagaactacatagaggtgtaatagattgaagccaaataaatatttaatgagacacagttgaatacttcgatattcagtcaaccagtgtgatatgacgtcatcttatctccgaggtcatccatgattgtggagagctgacaaattagaatctatgagcttcttataactacataagtactacttacttgcttccttaattattccagatgttctctcgttcactgaaagacttacctcgattatctcacttcgcgtccagatttcacccatattctactatgtcttcaaacattaccctatatacctggcccacgccgaatggcatcaaagcttccatcaccctcgaggagcttggtctagcttataaaactgaaggccttgatatctcctccaatttgaatccccaaaaggaagagtacaactacctctactacacaatacgacatgtcacataagctgatgaaagcccttgaacagatggttcctgaagatcaaccccaacggccgcatccccgccctactcgatggctcgcagcgcgtctttgagagcggagcaatcatgacatatctagtcgacaagtatgacaccgaccggaagatcagttacgcccctggtacctcggagcacgtcgaacaaacatcctggttaatgttccagatgggtgggctcgggcctatgcaaggtgcgttcaaaatctcttgtacgtgtgtttcaggttctctctcacacccaataggacaagcgaaccatttccgtctcttcgccaatacgcgttccgattacggtatcaaccgttatatcaacgagacgaagcgcctcttctcggtcctcgaatcgcgtttgaaggaaagcccttacctcgcgggtgagaagtatactattgccgatattgcgagtttctcttgggttcgtggtgctcctgtttccttggagattgatctatctgaattccccgctttgaaaaagtgggtcgaggagattgataagcgtgctgctgttcaaaagggagtcgatgttcctcattcgactaggactcctgagcagagagctgaatttttccggaattgccgggccaagattgatgccatgaccacttctgatcagcattgattgatggtagtatattgggtttctggtcacagtgccgaaaaacaatagtacaaaggaacaagtcaagctcgttgcaacaatatcataacattccttgcatctaggagtgatcctatgtcaaaggtctgaattatacatcaattcctcgagtaaccaaattctgaacaataaacaaagaggcaatagcaattttgaatagtcaaagctccccgggcctgtagcttctccaggtcttgaacccaacctgctcataccacccgtcgagcgcaacccagtctacaaagacaccttcaatgcctcgctgcttcatgttttcaatagcatgacagatcaatgccagtccaatgccatgcttgcggtgtgattcatcaattcctacggcaccaatgagccctgtgtttggaccacaggtttgggggaatgcccaagacttgttcaaagcatatgatggaccgagcattagtgtccaaccaacctgctggccgtgagagtcgaatgctatcatcacactgtcgggatacttgtcgggatgtaaagcgacgtatgcctccacccagctcttgataaaattttagtatgaattccaacaaagtacaagtggagagaaacacaggagtcttacactgtccttagagaagttttttctttggccaaccaaacaggcctcgtaatcttcgggttttaatggcgcgaagcggaagcctcgctcccgggcacgagtgatatacttctctggcgactggaagttccgaatatcttggtacaaatcaaccgaccgggcactgggagggctgagtcggaaaccacggtgagtgaagaaatgttgcactgtttctggaaggtcctggggtatcccgggccaaaagcgggggaatgagctgcccagcttcacattattgaagccaaaggttgcccggaagtatgctcttgtttcgtctagcaaggcaattccaatgccttgatgttggtactttggcgacacggcaagaactgcgatatacacggtgtttggtgcactatgggcatttgtataagcaagacagaagcctactagctgcgatccaaaacgcgcgatgaaatggtgaccatgcgggcgtactatcagagaccgcaaactttcagcgggaataaggtaggtcgggagagcagcggcccagacttcgaccacctcatccagatctctttgcgcatcaaatggcattactaccgcagaggtctttgtcgaagcattaatccccagcggaagagcacctgtcgggactaatgctccaaacatgatatcggcagccacagaaaatgcctcgatggtcggctcgtatgtggtaatataggtcttcacactaggagcatcaaggaagtcgtaagggttgcaaacagcaatatgcaccaatgcatgaacacgttcagcgagttccaagcctaatgactcctggtatggcgactctcttgcattgaatgaagtgaaaatcaccacatcagcgacttcaagggttcgccattgctccgaagtcaaaccggtcgctccgtatctgagctccgcaatggaattgttgtgttgccgcaagacatcaagatatctgttagactgatataatcctggcctccccgttccttcgccgtcaaccgcaccaccgactgggatattatctccagggaagaggaagatgatgattgaagtctttgatagggggagaatgccatttttgtcacgaacgagtgtggtcgatcgagaatatatatccatagtcgtctcggcaattctattgttgagcgagttcaagtctgcgagattagatttttgaagagcgacatcccagttcaaatacttgtccttcaccgtagcaacatggcgacaagcgtccgccagtcgtgactgctcgattctgccggactttattgcttcacaaactgccttgatcgatgctacctgcacatcaaaggtatgacagatcatgatgctatcgctgccagcgcgcaacgctaggaccgagccttcttctgtaccgtatgtagagcggattccatccatctccaggcagtctgtgatgatcataccatcataggccatgtccttgcgcaaaatccccataacatccggagaaagtgttgcaggccgcgtgagatcgatacagggcagcgagatatgagcagtcatgacggtctcgatgccttcagcgacagcccgcctaaatggaatcaattcgcaacgctccagctgatcccttgttttgggaatcaccggtagtccataatgcgagtccacagctgtgtctccatgacctggaaaatgcttcacactagggacgatgttttgctcccgcaaaccccgcgcggccgcactcgcaaaccggcccacaaattcagggtcatcaccaaagctgcgtacaccaacaactgggtttaagggctccgagttgatatcgcacaccggtgcatagttcatgttaatcccgaagaaactcaaagtttcccccgtggctttccccgcactgtaggcgcactccgggtcatgcgtggcgccgagtgccatggcgcctggtacttgagcagcgattggcggagatatgcgagtgaccaacccattctcctgatcgattccgatcaataatggtcgctcatgtccagccaatctggcttcattctgtaaagctagtgtcaaggcctgaagaagattagtcacgcgtcaagatacttggaacctcggatatcgcacctggagctgttctgaattctcaaaattgcgcgagaagagaacgatacctccaacgtggtagtcatgaatcaaaatcttgatttcgggacttggggtgcagccatagaaccccaccgcgaagagctgcgatcgtcagtgagattcacaaaacaggggtttcagagctcatatacctggccaacctgctttttaagatctgaagaaaccattctgggtttgttgattttatttggatggtctcatggattgcagatggtttaaacgggagtgacgttgaaaaggatcggagttgactcggtgtccacccgtgaacttgatgcaacattgcacctacacttgcgcttgaggatatttcagcttaacctcttagagtctagcgaaagccaattgcgattggaacatttgaatgtaacaacatctgatataaaagataaggcaagttcgatggatgcggggtaggtaacctccagggcttgataggagatatatatcttgcaagtgatatctcgtccaacttgaactaacacttgcacttccaaaatggctgaaattcatgaaaatggtaaaaaccccacatcggttcaggtggccgcctcacagccacattctaccttggaggagtatgaacagctctttggcgtcgacgaggacgcgtatgagcagccaaccaccactaggaaagaactatggtcctattatctctattacaatggcgataacggtgtcggtccgggatcgtacagtcaagctctgtatgtacaaatggcaacgctggaatttttcgactaatcccatgaagcttccagtgggccttgaacggtgccggacatcaacctggctcgaatccacctaaagcctgcaccgattcatcggcatgtgtagtgccgtgggcgggaggcacgagatcagtatcttccgtggttcttattgccaatggcctttgcttcactttcatgacagtgatattcgtctggctgggaagtgctgcagactacggaacattcggccgatggcttcttctggcattgacagtggtctgctgggcactgcagtatggtatgatgtccatccgacatccaagccagtggccaacggcgatggcattgtacgttgtttcatacattgcctacggcgcgacgctagtattctatgctgctgtatttccccgtctggcacggtatacgccgcatgtgcgcaaagcgagagaagaggatctcagagagggtaagatcaaccaggaagaatacgatacggttgaatcactggagagaaatcatatcaggtgagttgggaaactttgagctcctggccaagatgtcgctgacgatagtagcaacatttcaactgcacacagtaacattgggtacctattcacgctcgtgcttaatcttagcgtcctgcttccactccaaaacaacactttctcgaataacctggccctctgtcttaccaactcatgtaagctttctgagcagtcaatctagtgtgggatttatctaacgttctacagattgggtcgttcttggcatctggtggtttattttccagcaaaaaaggccaggtccaaaaataccaaaagggtcaagctacaccaccattggcttcaagcagatctggctggccattcgggaaattcggtctctcccacagacatttctgtactttttcgcctatttccttcttgccgatggcctaaacactactggtgggttcattccttctttgcttgctgcaacgagactctatagccccatgtggacaagggaattcactaatatgaattattaggtaccctcgtcagcatcatccaaaacgactccgtctcgttttctttcttgcagattacatatctcggcattacccaagcggcctgctcgatcacctcaacattcggcttttggtatatacaacagtacttcaaatttaagacaaagactatgttcttgttcacaaatttctttaccgttttgatccccttttggggcatgctaggactatggaccgatcgcatcgggtatcacaacagggtatgtatcaggccccaactgagagtctgcagctaacagccatggagtgggagttttacttctacaatatcatctttgggcttttccaggctccatactatgcggtaggtggaactttgaatggtcttcaacacaattcctgctcccatagcttctaatatcgtgccagtacgctcaaacgatgatcagcgaattgatgccacgcggctacgataatatgtttttcgcactttttggaataaccaatcgcgctgtaagtcggatgtcttgaatgttatatttccttcgaatcactaaccttctagtcttcaataatcggtcccaatgtcatccaagccatcataaacaatacccacaacaactggatgggcttcccatttttgtttgcaatctgcgctggggcaatgatcgctatctgctttgtagacatcaaaaagggtcgtgaggactgtcgagaattcaccgaaaagcgcaagatagatcgtgtcgtggcggagagtggtctagatcccgcttatatcgcaaaggggaagcaatcagctcgtaacgaagatgtccccgaagtgcaaaacgagctcgcaagcacttcggtgagggagtgagcgtgtgtattttgcgaacatttgagttgttattcttcagctctcttttagtctctgttttgatatgtcacatgctatcattaagtcttacatagatgtcatgtctccaacgagatattctaaatcgactcttcatgtctcagccttttttgtttcctgctgtatctccttggtgctctcctcgaccttacgctggtccctcttttcgaccttgtcccgccattgatcgccgaaaacagtcgtgagccatacaccgaccccggatacaatcaaaaatagggcgctgatggtactaaaccaccccactcccatgctctctatcgccggaagaacaagtccagaccccagagcaccgaacacgtaccgtgataggtagctaccggcaacgacttcagcactccggccgcttgactgcataacatccaggctgtaggtattgagactagggaagcagaacagctgcgccactccctggaagaacatcgcaagcacggggactggaattccaccaacagccttatcgaccgtccagccgtagatcaaaatacagccggggatgacgacacccaagaatatcagacaagatttaagtctgtcttcggggactcggacaccaccgcgcttgcgaatccatttcttcacagtgtggtctgcccaccttccacccatgagtgtgccaacaagataaccacagcctggagcgatgtaaaacagtcccgtctcgatagggctagtgaggtggaagcgtgggttgagtacatatcgaatcggagtcaacagagagtactggttccaaacgagagcgccggcagcgagacccgtgcagaagaggttggggtatttgaatagcatgatagcaacttggaggggagagatccggtgccaaaggtatttggctttttgccacgtcgtcttgtcggctatgtcgcctttagtcaaattcgggtaggtttcagggaaaaagaagaagacaagaagcgtgccgcagcctccaagagcagcctggagccagaagatcgctcgccatgagcgaaaggtgacaatcacgccctatattagtagatcagcggattgtctcggcgccggggttataagatagacatacgccaatgaatggtccaaaggctggcccaaccagggttcctgacaaaaaccaccccaacgctgttgcccgcgctcgaggttcgtatacatcacctaacgccgagctcccaactaccaagaaagatgttccttggaatgcagtcaagacgcggaaaatataatacgctgggaggttgggtgctagtgccgtgccgatgctaaacgcgaaaaataagaatgcgctcacaaggaaaacctagtcccaattagcatgttacttcaacatgaacatatgctcgttactcaccggacgtcgcccccaaacctgactaaagggcccccaaaagggagccgcaatgcccatgaatgccatatataacgcattgctcgcgtttatcacacttcctgtggtgttataggtcttggcaacttcaggtataccagctaagatagaggtagaagagataggtgccaggaaagagcagaaggaaaggatcccaacgataatgaccttgcgtgctggtgaaaagcgtagatattgctctgcgttgacctcctggaagtcatcgttgacaaccatatcatgatgtgaaacatggctttgtacgtgatcaagactattcacagctccttctcgctgtgagcgtcgggattgggatctctgaatttcggtttcattcgcccaggattgagaccgcctgtcctcgctggaagctttcgaggtagttggagacatggcaggaaccttttagcaagagcaagtgcgtgctagcttgtggtaaatcagatccgagtctatcgcagtgcagatgcaagatatgaaaaagaaatatttgcaatcgttcttaaattcggcttctttccgagatcatgctcgtcgggtagatccgtgaacgcagaacgtcttcaattgaaatagtaaaaagtgaagagatgaaagtgaatgaattgagtctaagcaagtcaacagcaacgagatatatcgcagacttaaagcgtgagtcagagaaatttgaatggctcttttccctatcatctggaaggatcggcgggttgcttccgatgtagcatttctagaggccagcggcccccgaacagagggcttgctatcatctctgggggtccattcttcccagtttagaggcgatagacgaatgtgattcggggagaagaccggcgggtttgttgagtagggcagaggggcggaaaagaatccgggggctacgggtgccggagatacggttaatccgtacggagtactagttgggcatggaagacgaagaaaaacacctaactatactataatgtatgttgtaaatcttttggggatcttataagctaatagatatttactagcttttttcaaattcaggctctcattcctcattcattttgttacctagtactgacccactacggctagtgagatgggagtctttcacatgtcgaacagatgctagtatataactacctacacgtaactaactacgtaattataaaataagtagttaactagttgactatttagttagttaactattgatcatttaataaaaaaactctttcaaaaggagtatctggaagaatgcctattctggtgttgtggctgttcagcccctgcccatgacgttatccccttctgaccgccaatgaccgactttgtccctctacctacctcccccacgctttttgcttttgtcctggagatttcgagcccaatttaatagcttgcgaattcattcttattccaaaatatgtctcctcagagtcaggtccctgctaatagcaagggctcatggacaagtttcctaaaggtatacaggctcattttgttcgagtatacctttgctaacaaatttccagtcgattgcctcctttaatggcgatctatcctcgctgaccgctcctcccttcatcctgtctactacctctctcaccgagtattccgcctactgggccgaacaccccgccctcttcgtggcaccagctaaggaggccgatcccgcgaagcgtgctctgctggttctcaagtggttcctcagcacactgcgccagcaatactgcagccgtagtgagaagctcggtagtgagaagaagcctttgaacccgttcctgggagagctgtttatcggcaaatgggtgggtgacgcggaagtaggggagactaccttgatcagtgaacaagtcaggtacgcgagaccacttttgtataaaactacaacccactgattgaatactagccaccatcctccggccacagcctacgctatctgcaacgaggcaaacggtgtcgaggtgagtggataaagattgtaccaagtcattgagatgttaataactgacagtacaaccacagctgcaaggatataacgcgcagaaggcctctttttctagtaccatcctcgtgaagcagattggccatgcgctgtacactctcaccaagcccggatccgacgataaggagcaatacctgatcacactacccaacctacacatcgaatcgctgatctacggctcgcccttcgtcgaattggagaagtcaaccaagattgtcagcagcactggctatgtcgctaagatcgactattctggtaagggctggctgagcggcaagaagaataccttcagcgcaagcttgttcaaggaaagcgagggcgagaagaagcctctttacactgtagagggccagtggtcggataagttcattatcaaggacgcccacaccaaagacgtcgtcgacacctggagttccaaggaggaccccgtcactccgctcaccctggctcccctcgagcatcaagatctgtacgagagccgacgtgcctggagcgaggtggccgccaacatccagaagggcgacatggatgccgtatctgggaacaagtcgcgcattgagaccgctcagcgcgaacagcgccgcctcgagaaggaggcaggccgcgagtgggagcgccgtttcttcagccgtattgaggagagtgccgaggacccccaaatccagcatcttgctaaagccatcgatcttcctttcgaggccgacaagactggcggtatctggcgcttcgatgctcagaaggctgctggcgctcagccgccttaccacaagattggcggcgagggtctcggtctcaccgagtagactattgctgggattggacaattctctgtcgccctctgaatttttcttgggacctagcttgcacaacatagatttgacgtttttggattcctattctgcaccgtgtcattttgcatttcgattgtatatagttcccggtccaggttgaagttgaagccgcgcacttgcttataagcttggacggctcaacttttccatataatgatatggtatcttgaaataattgatagtttacatctttgaacttggtgaaagttcatgtcgaggctgaatgctgcgtcaatgacgaacaactagtacctccgtgactacgagaaagctacaatgtacaatactagaacagtctctatatataggcgccacactggacagtacaggacatacataattcatgacacttttagcccagaacgcaactgggcattggatctacctctaccagacccgttcagccatacatcataatcatcgaccgatattgcacatggtgagggacaaagacagaacaacagaagggagaagtaggttaaaaaaaaaaaaactggaaaaccgtccgcggaaacaattgacacaccgtacccgaatagacaccgactaggttatagcgagaaaacaaaaaagaaaaacagagaaacctagagaggaattggtgaatttaatacagagaccgcatcagatgggagcagtggtagcaaagaaaagcaagacggctgagaggaatggcaaggaaacgagaaagaaaacaaataaacatcaagaagacaatcccccaaagtaaagaaaaccagccaagctcccccaaaaaaagagaagtagagattacacagatgttgaggagagaaagatgaaaagaaatcgtctgagttctgtctgtccttttgacaagacattagaggtttctgtccctgtaaagtggacaaagaaccaaaccccttttcaaatcatccgcaaatgcaacgccatatgtgtttggtgggtcattatgtctccccttcgtttctttttgtctttttagtggccgtagttgccaccccagccgccacggccagagttcgcatagtagttaccgaagcctgccccgtagttgttaccatagccagaggcctggtgagtctgggtggccgcaccctggtgaccgagtccaccgagtccaccgtactgcgggtttagctgagggtagctaccgaaggactgctgaccctgctgaccctggagcgggggaagaccagtctgtgcctggggctgacctgggacgctgttggtagcagatcccggacggttctgggcgagagaggggctaggaccaccggccttgggagcctcaaagcctttggtctcgtcggtggcaacagggggctgtccggcgatgggaggatttgggccgaagctgccctgggaacggctgaaaacatccgacatcccagtaccaaaggcattggcgccagtagcagactggttatcagactgctgggcggagccagtacggccgtagacagagtcgcggctgggcatggcctggctgaagctaccggtgtttgcgggggaagacgattgctggtcataagagaaagccccgtggggttggccgtacatgccacccttaccggcatagggaccatactggctaccatagccgtattgctggttatgctgctgctgttgctgctgcatgtagtgatcctcataccggcgagcatcatcgtacctcgggcggttaccgccaccgtattgctgctgctgctgttgctgctgctggcccatctggttcatgtaagaagcgtagtgggggttgttgtagtagttaggatattggtagccataggcgtgctgctgcgcactttggccaggcatatgctgagcagtgggagtctgctgggttgcaccgggaatggtgggattgggagtgttgtggccgctgttagtggcgtcaacagggccgtagcggttaggaggctgcgtggtggtaatctgagcctgggcctcagcacccgagacaccaaacccagctccggcgcgaggaccggcgggggcgtcctgggtctggccgtaagagccataggaagcgtagtaggggaaacgctgctgctcagcagcgtagaaaggagagtactcgctgccggtggtggcagtaggttgagcaggagcctggttggcgaatggctctgggatctgcggctgcggctggctcacctgttgggtgaagggatcgaatggcttctgctggggctcagagtaacgagcgaagtcggtaaaagagtcggcggaagcaccctgggggaccggaggcaaaccaggggcaggacgcccaacggcaccagactccattgagtggggtgcctgagtcgcgggtggaagagaggcacggggggcaacgggggagtgctgcgggggctgagcgcgggtctcggcctcctcgcggttttcatcgatgtcaatagcgtcaccgttcagtcccatgctaccgaattgaacagcagcacggtctactgcgtgattgccgggcataaccacagcctgctgctgttccatcacacggcgttgaaggcctggggtacggccctgtttggtaacgctgggagggtatgcagacgcggggaagcgggagggagtaggggcagctgcggccacagctgcgggatcaataccactgccaatggtgcttgcggcggtggcggtaggagcgggggcggatgcatcggggatttgttcgaggttcgtctcagtcaagtcgtcctgaggagggttaacggcggcggtcggaatggcggggatcacgggatgggtgggcttggcgacgggtgtcttctgtgaggtagcgggcgcagacacaggtgcgggagcgggggcggggggagatggctcggcgacaggctcggtgggcttctcggtgacgggaacaggaggagcggcttcgggcttcttttgcaccggaggagcgggtggtttggcaaaaagactcgcccaccccttctttgtgccctcagggatcacactgctcttaggctcgggcaagtccaattcgccttcagttgtgggctctgcataagtctcctctgccttaggcgtatcccactcggatgtgatagcaataatagcagaaggcgccggagtctctacagcagtggatactgcgcgagatccatttgtagtcgctcctgcacggcctccacgaccgccacggcctcggtctgcgcgaacacgtccacgaccctctattccaccgcgaccacgggttccacgagcagaagctgcagtcgtctcggtcgaggcactgggggcctccttgggcttaggacgagtccggtctgtggtcttcttcttgacctcaccccactgagatacattacctgtaaagccagtcagtcacggtcttcgaatcacaaggttcgattgatttcgagtcggggagattggggttgacgggaactcgaccttcactgatgcgctcaattgcctccaagagctcgccgttcgagtcttccagtgcaaataccagatcttcgtccttccagtctgggaacatttccctaagagttggcagagtgtcggagtacttcttcttcatctgtccaatttcaccctcttcaaaggatgagatgtctgaattatcatttgcagatctgtttccaccacgaccacctctggagctgaagccgccacggccaccacgggcggatactctaccccgcgaggcggaggaccggttctgaatatcggacatgttgattgatgaagatgtgtgagatggagaagtattgaggaaggaggtcacgattcgcagggaaaggctattgaaatggagcaccctcgcagaagaggaacagcaccagaaccacaggcacaagggccagaagagacaaaagaaagaggtaaaatcaaagagattaattgggggagagggagaatgcgttaggagatgacaagattgaagaaaggatcaaaagctaacgggatctgagttgcttcccttcaagtcttggcgttgcctggcttttagcgagtggcgcttattggatgctgggggggatttacagtaacaaagggatctttactggtttctttacattttgaacggaatctgattccgaataattatattggaagacatttatagatctagataattcgttgcattccattgaccgaatggaaataatttttgaaaattgtttcgtgtcagtgtggttggtttcttctactcgtcattcacctttttttcgctttgggcgacagaaggctagtttcaccgccctcgtcgatcctcctctttacctcgatgcacatcatccctcagaaccttgaaactcttaaaccatcatgaagggtacatccatttttcagttcaagtcctggcctaaaatccatcaacccttacctcgtactccacgagagtctcagcaactgttaaatgccctcacgtcttcttttcgtcgccaactagatggggcttatcccgcgtcaggcaacaaccatggccggcccctctccaaccctgaatcatcagcgcatgcaaccgatcagcatttgcagaatatcctcgacaatccgcttttccgtattactccgactaaacccatctcacgagaacccaccacattgcaaagcattgagggccagcgtcgactagccgaagagcccatggccgtatttgatcaaatggctgcagctggctcagtcactaccctcacaatcaatgattgtctgaagtctcaacttctactttccaggtccccggccgatatgaatacatctcgggttgcatcgaggatcgttgattggtattgggcatcagacggcacatcgaggcaaatgcttctgcgtttgcggtcagtcactacgtcgttgaccaagttcatggtggcagagggattacacagtactgttatgaagtggttgcagatgctcatgagccaggacctaggtagtcagaatggccggatgactgaagggctcgcgcggcagacgtttaatcatctccttgttgattttatagatgcagaattctgcttcggaaatggcttcaactcagcgatggcacattatctgagtgtatgccagatgcatttccaaagtacttcttcccataagtcaaggaagccgatgctcctggctgcaggcgcccacctgagccgtctggccatggagcataaaccatcgggggagcaggtatcaacactagtttatgatcagttcagagatacggtttctgtgctgtctcctcggtcattactgctcgcatctgtggctgtctgccacccaacagatcctgatccacgcccgttcctccaatttgtggagaacctctcaccaagcaaattccaggcctggaatgaaactaggcgtgatgctttctttgagattggttcagaggctctccgtgtcctcgttgaccgaaagaggttccgtgatatctcacggctagagcaacatatttcagaactgctaccggaacagccagcaactccagtcgctgagaagtcacacacatcgtctgaggaggaacatatcgcccgtctaaactggagctttacatgatctgctggtctcaaaacctatcgaacaatcactctactctcgcacaaagctaggtttcttgaaaaacattcaagccaccaacactcaggagacacacatatctctctatctttcaaccacaaaagaggtcaacttcagtgatgtcgtcacactgcaactcccctccgcatgtctgtgtactattacacaattgaattctttcagcatggatgtttgacgaaccttcattttccaaatcatcacgcaaaggaaatacactctcgcgactccactccgagtttgagcctcatattcttggcggtcgtacatacattgcttgccaaatcgtccgagagatttgagtcaccaggcagacttggctgaaccagtattttagaggtgtgtgatctgagatgcacctgaatactatcaattatctcaaaaatgcctcttcgttgtactaaatatacgaaatatcgaccttcctgtgatatatatataagccattgtcaatagtggctcagccggtttttagacaagctgtttgggctcaatgaagagcataacctaaacatccatacatcatctcctagctaatgataagatttacagcctttgtggtcgagtactaacctcgaacaaacccgtgctagtcacagtacgtcttgtggataacattgcgtggcaattgtaattctgcagctggtgaggctgtgcgacagaatgccgtggagagttggagggctggagcggcgaatcagccgagggctctccagtgctctaaatacgtcaccgcgcgacctcacctaacgatccccccaaattgatcgactcctctgtggttttttttctccttgtacaagctcacctgagcaagatttacagtcgcattgcttttgcgaatactctcccactcaatctttgccaacttataacccgctgtcgcggcatttgacatcaccgatctacaatggccgaaggagcccgcaatgcagattcaggtacgtggtttccatgcactactgctgaatccgaggagtaattggtctaagcagcccaattatttcctggaaatatggttgcaggacagtctttctttgtttagttaacgcccaggtgtaactatgccatatgctgactaagggatataatagatcgggacactgcccagctagtcaaagaacactcaggtgcattccagaacagagtaaacacaactcaaacggatagcccgcctattcctgaaacagcaaagcccgatatagataccgaccagttaaaggcagacgccgggctagagacacccgagcccgctccagaaactgagccatccgtgacagagcccgcaggatctgctctcggcaatattcctattgcccatgagtcgcaggttccagtaggacccacaaatgaaacagtgccgggcgaaaagcgtggcattgattcagctctggcggaagatgagcaacgaaagcctgaaccgtcggatgggcctgataccaagaaactgaagacagacgaagatcatgtcactggttctaatggtaccgccgctgctgcttccaatccagacaacaaagaacagaagaaggctggtcggtccaagaaggagaagatcaaggatgctgtgaacaagattgtcccaggagatggcgttggtagccggactcgcagccggaccaagggtgcttgaataaaccgaggtcactatatttacagattcgcgagtgacatccatgtcatcatatttgttccgactttgaatcatgactattcatgttcggcacttcctcattggtgtcactgtacacgtgctgcaataagatgaatattctttcctgaccgaaatttgggcggggaagttttcaaattcaaaaaccacagaagttctacgcaatatcttcttgatcatgtatgacgttttaagacaagcaactgtttcactccgtagtatggttgtagacatatgcgctgccttacaacttccgccctatcacttttactctctaatttgtcccaatgtttgtcccaatgtcaaaattcttcctggagtacaagttatattttcaaataatttcgaacgtttccctaaataacgttgaatccctaaaccctcccgggggtctctttcggaggtttgagttggtggccgataatcgggactgagtcatttctcggatcggaataactaaccctttctatccccgcttattactggaggggaaagtctgtgtcattattggtgatagagcattgatatttatttgattactttttccctttcatcatattcaattctctactttcaaaatggctggacaaaagatttggctgcgtgctgagaccaagcctgctgaggcccggtctgcctgtgagtagtctcagcccacctacaatggcggggaggcaattggctaatataccatccagtgaccccaaccacctgcaaggcattgattgatgctggatatgatgtgactgtcgagcggtcaactcagcgcatctttgacggtacgtccaatttcccatgtcccccatactcccaccatcccttgctattggactcaatgactgattccgctctatagatgaggagttctccaaggtatgattcactcagtaatagctcgaactcgccctaaatatcatcaattgttataggtcggcgcgcctttggttgaggaaggatcctgggttcaggatgcgcctaaggatgccatcattctgggtctcaaggagctgccggaggatgatttccctctggagcacgtccacgtcactttcgcacattgcttcaagcagcagggtggctgggagaatgtccttagccgttggtctcgcggcaagggcacattgcttgacctggaattcttgactgatgattccggacgccgagttgctggtaagactcttgtcccaaagtgttcttgtcttgactcaattgactaactcttgtttaatagccttcgggtggtctgcaggttacgcaggtacctatacttgaactccgtttcctgatacaatcaatactaagcgtggaacaggatctgctttggctgtgaagaactgggcttggcaattgacacaccccaacgaggccttgcctggcgaggttcactatgccaaccaagaccttctggtcgagtctgttaaggaggcgctcgaggccggcaagaaggtcgctggcaaagcacctaagatccttgtcatcggagctgtgagtcttgcacagatgcacagaaagcgatacacatattaacaatgctgtagctcggacgttgtggcagcggtgccgtgcagctggccaaggatgtcggtatccccgactccaacatcattgagtgggacatggcagagactgcgcgaggtgagtcaatgactattcaacatcttgaaatctggtctaagctcacaaattaatgtccacaggtggtcctttcaaggaaatctcacatgaagcggatatcttcgtgaactgcatctacctctcggccaagattccaggtaatattttacatacatccactcttcccgactcaattggctaatatccttttttcccattagccttcgtggacttggagtctctctctgcccccaaccgaaccctgtctgttatctgcgacgtcagcgccgacacgtaagttatcaaatccgaaactatgcaagcgagcgcacagctaatcctcagaagctccaaccctttgaaccccattcctttgtacaacattacgaccactttcgataagccgacagttcccgtctccggtctggaggctggaggtctccctctcagcgttatcagcattgatcacctcccgtctctgcttccgcgtgagagctctgagatgttcagcgaggctctcctgcctagccttcttacgctcaatgaccgcgccaacgctcgggtctggaagcaggctgagcagctcttccatgagaaggttgctaccctgcccaagtcgcttcaggtctaaacttgttgcgctggtaggtgtcgaataaatttacatgattgggtgcatcggatataaatacttacagataaggaatgctacaaaagttgtaagttcacacatgacagatgctgaagatattatccatcgttcattgttccgtcctataaggcagtagctctgcagtagctctatcaatgtgacaagctatggagtcaacttaaaaatggctattttaaatacttatcttattgttttccgggccaatcatctcctgcgttctcaaccgaatcgcttcgtggcggagatgacttgtctaaaagtttatatttcttctaagaggcataagccccgtatttccgatagttagagaggcattctgaaatccctgtcattccttgtcctccaggcaagacatggctttaccccagactacatggaaccgcggtcatcctcattatgtgcggggatgtgtgtaagacggatatccggagaatccgtccgtggggtctaagttctaacccacagaattgcctcattggatgaaatgagagcctcgcgcgaaaacgaagagaggaatgtcctcatgtccttcatcgttgaatcgtgacgatcgcggagtttgccccgtttgactgtggctaacctgatattggactccgggcgtggttctttctccgcataacgctccactctcaccctttctcccctcttccccgaacttattcgattctgccctcaaaattgatctgtcagcctttcaacctcggaagaccctgacccacattggaattctcttgtgatcaggtctcttaggacattcagcgctcttatctaactacatccgggctaattcgaggatggggtaatgagacgtctgcctgcttcgacacctacacgaaccgccgaacctctttccctctataccgcattgcttgatgcaagaaaagccgacaacagtcgccgcctatgcggccggggcatcgctcgctgccgttgctctgttctacgtcttcgggccgaattacacaattgacggagatgagtcaaacgacagcaatcgcaagaagagcatcgtgggcctgtctaatctggccaatgactgctttatcaattcggtgctgcaggcattagccgggctgggggacctgcgggtctacctgatccacgagttgcaccggcgccaactggacggaccggaaatataccatacactgcccagcgaggatgaggtttcgcggacgcgggcgcggtcggacaagttgcgggagttgcaacagggaataaccacacgagcattgaaggagatgctggaccgattgaacgagcggccgatctataagaaaacaatctcggcccgtgatttcatccaggctctggaatacgcgttccgcacgcgcatcagccgcaatcagcaggacgcgcaagaattcttgcagatcgttcttgagcgactctgtgatgagtaccatgctggtgcacgcgcacgtcaacgagcactgggtgccattggtgcagctgcttccagcacggcaggcgaagagggcagcccacaggaaagctcgtccgaggtggaggtgcgcatcgatgatggatcagccaatggactgcctgccatcatcgacacgaaactcaggaaaattgaccaggagtctgggttcccgttcgaaggcaaaatggagtcgcagatcgagtgccagttctgccattaccagtacaagccaaaccagacggctttcgtcaacctgacattacaagtgccacaaaagagctcgactacgctaaactcatgcttcgacggccttctcaagactgaatatattgaggatttccgctgcgaccgatgccgcctgcagcatgcggtggatgccaagaccaccgagctagcccgcgcccgaacacagggtgatcgagatcggttggtccaggagatttcgcgcctccgggaggctctggagatggaccctgaggctgagttggagggtatcgtattccctccctcagagaccgcccctaagcgcaggatcgcgcggcatatgcgcatcacagcgttcccaaaagttattgccatccacttgtcgcgatcgatttttgatcagagcagctcaagcaagaacgcggccaaggtctcgttcccggagcggctccccttaggaggcatattgagccagaaatggtacaaactgcttgcgattgtctgccacaaaggcagccaccatagcgggcactacgagtccttccgacggaatcatatctacccgcctttttcaacacctgaggtctttagctcctatgcacagagtcgcactgccagtcagaacccctccgcgacggccagtcctcggatagtaccacggggtagccccgatgccgacggcgacggaagcgtttcaggagcaggctcgtcgacgtcgctatctggaggatccgcgactcaactcacccctcctcaaccacggcctacaacctctggctcacgacgttctttccagagcaactcccgttcctccaaacagacgttgtccccgacctcggacagtaacagtccaacgacagatcagggtcactggagtccgtccgccccgcgtccctctcacagcataccccgctcttcccaggataaccccactggggtcagctcgcgacttcggcgccgtcgcaaaccgaatgatcgctggtggcgcatctccgacgaaaagatcaaggaatgtaagacctcggatgtgctgggcatgcagaaggaggtttacctcttgttctacgaaatggagaagcctgacgcgagcgctggcaagggactttgattgtcttcttttcttttttttagattccagtacatacatactcccatacttctgtacagatggggtggatcgaattaaaaggggatttgaatagagatatgtacagaatcagaccaagacatgtaggtagtggaaatagttagttccgataaacggcatgacctcgggatatagatgatgtcaccagactaagcttaactagttactccgtacccctctagtgttcttattctacattctacattattctaaatctcagatgaattaagaaaccagatatgttgtccaatgagattaactagaactcggaaccagattgaatcttgaaacatgattttagttagcatacacatgtacaaatagtaataggaaatggaaatgcagcgaatggcctcgaactcctcggccccgccacgaacaaaatacggattcttcgggcacttctggggatctgggtgagctattgtatagctgggatagctattgtagttgtaatagctgtagcaagggtttatgactgtggttatcaacaactttgaagcttaagcccatggatataggaacaatggcctcatcactcccgttctaagctcttgatagctcccgatccctcgacaacatcgggctatcacggggaaggtcgggaacaccagcgcaagagcccataaagtatattatatcatctgcccatctcttcttttccctctttttcctgaaatcacactgacctcactccagttccactaaatctccaccaccggtgagtctgccctgtctcccttcaccgatgacgcttgcccctccatcttttgcccctccttcttatttaactctgcccgctttcagctctcggtaagagcttggtttcactacatttaacgactttatcattggatatctgaccttctttccttctttcctccttcagatttctacgaatctttgtacaaacttcataatgggtgtccttgagcaacttaaccgcaagtccggcgtcattgtcggcgacgatgtcctccgtctcttcgagtacgctaagcagaagggcttcgccattcccgccatcgtgagtcccgaatgtgttctcctgaggaaccttgcactaattcaatctagaacgtcacctcctcctctactgttgtcgcttccctcgaggctgctcgtgacgacaaatgccctgttattctgcagatctcccagggtggtgctgcttacttcgccggtaagggtgtgagcaacgagggccagaaggcctccattgctggtgccgttgccgctgcccactacatccgtagcgtggcccccgcctacggcatccctgtcatccttcacaccgatcactgcgccaagaagctcctcccttggctcgatggcatgctcgatgccgatgaggcttacttcaagctgcacaacgagcccctcttctcctcccacatgattgatctctctgaggagcccgtcgactacaatattaacaccaccgccgcctaccttaagcgcgttgcccccatgaagcagtggctcgagatggtaagtagacttgagaaacgagggacaacattgacataatgctaaccacttttacaggagatcggtatcaccggtggtgaggaggacggtgttaacaacgaggatgttgacaacaactctctctacacccagcccgaggacatcctggccatccagaatactctcgctgccatcagcccctacttctccattgccgctggcttcggtaacgttcacggtgtctacaagcccggtaacgttaagctccaccccgagcttctctccaagcaccagaagtacgtcaaggagcagaccggttcttcctccgacaagcccgtcttcttcgtcttccacggcggctctggctcctccaaggaggagttcaaggaggccatcagctacggtgtcgtcaaggtcaacgtcgacactgacatgcagtacgcctacctgaccggtgtccgtgacttcgtcctcaagaacaaggactacctcatgtcgcaagtcggtaaccccgagggcgctgataagcccaacaagaagttcttcgatccccgcgtctgggttcgcgagggtgagaagaccatgagcaagcgtgtcaaggaggcccttgaggacttcaacactgctggccagctgtaaatgttgacctctgtgtgatgtcgcataaatgattcccttttttacctctttctattaccctcatattatcctctcttcatgcggccgaaaaagcgttgggcgtcctggggatgtgggcgtccaggttgtatgtagcgttgtattctgacacgctgtaatgaatgttcatattacggtttttatgatcgctctggaatacaaactgtaatgttctgcttgataattgtattccaagaccagccccgttgtaggtaccagccagaccgtaagtatacttcgatctatccatcatcaactccattatcgaattacacatgtaggttgttacattatatttcgtcatcagtacaataactatgtacttggtgtttttcttgtcctagttattgcattatatctcagtcctgataatccaagctctcggacacgaagtggtttactcgacgagcaaacgggcttctcacctctcatgtctgctacttgcttctgtcttattattgaagtgattgactaacaatctaattttctcatacctctcatacctcatctctcaaatgaacctccatcaatccccttctccactatgaaactcatcttgtcccaccatcatcataccagcattaccatgccatctacgcaattaacccaagtgccacaatcggtacatacaaccaaatccaagcatagcccttcctactaactaagctattactgaaccaggtcctagatctcagtggagatctagaagaactggtatacaccaaagcagcaattggaatctacgaccgaaccatgctggcaatcgtcaacccgacaacaacaccgatggagctcaatctccaccacgggtcctggctacaggccaagtcgaaagtggcatcgctccaccggagcatcgtggcggatttcaatcggctgccgcgtcaaatgaaacgtactttcgtgagggccaatcgcttgactttgtcggagcatgggtttcggccatctgcagataacttggagatcacccgtcctggtagtaggagggctatcgctttgctttaaaatggggagctgggttacatactagcattggcatgttggtggaaagaggattggctgtcaattgttgctaactggaatgttgtgctagagattcatcagcttgcacctctattcctgcccctttctaatgctccattttgactccatacaccaaaacatttggtatggacctcagctgctacaccattcatcgccatcccatactcagttagcaacgttagatgattccacactcaacaacatactatttcccatttcagcgcacaagaatgctactagggcaagttgttctgctatagagattgtgctctggctctatgtctatggagggaggtgatagctgtccatatctcttttgatttgcgttgggatgctcgaatgctttcactgctgatggatggctcaaagatgcattcaaaagcaaattgatactcagaattaagatttcacaaacacattgcagcggttcctgtactatgtaggttcttttgattcacctatcaatgtattgtaatcctgtacaaattatctacgcgaaaagtgtgatgtagcaatagtgaggaaattgactggtagagcaatggttgatggccatatttctgctgtagtgaggatgaccgttcaaatctgtcgagatgctcgtgtatgaaagggatggtggactgaaaagacaattcactatgtaaggctaacatctatctacaggaactactgtcttcttctaacagagcagacccaaaaagggataatggataaaacactcagttgatgacatggccaagtaacacactataaatcaaagcagtgatgatcagatctagcattgatgaatttacaagaataacatgatagcgtttcagtcgtaacggtgtgagtctcagatagtgacaactcaatctatggtccggacaagattccatgcaacatcttacgcgctcagttccgagacggcagcatatatgagttcctgacataagatatctttttgaaagagcacccaacccaatcctcaaatcagagcacagcaatactatcaacaagcgtgtttacgagtccactcccgcgcaatctcctcatagcgtgaccggtcgtttttgtattgctccgcgatccgcccctcgacagcgtcgtcaggcatcggctcagatagtagctgccgggcgaattgaagaactgcggcgatcttcgagctgggtttccattcgtcggctcggagcatgcctaggcacatgcttcctttttcgtcgtttgttacgttcgggtggtatattctcgttgcgaaggagacagtcggcggcttgaaggggtattccgtgggtagggagagcttgactaggaatttgccattctgtattgtttgccgagaggttagaaacactgtttattggacatgaactgtgaggttcgagttcggggactcttaatggagaccttggagatgatgggggtaaatggggctagactatggtttgacttacctgatatggtgagccttcaggcccttccatgatgaccttccactcgtacacgttcgactcatcggccagttcaaccctgatcccttccgggggggattcggtgagctcagtcagctcctatgaaggtagtcagcacactggtagatgagatgatcatgtggaaatataggtacttgccttggatatgcgcttgacgctgcccattatggtgttcggttgtggatttggcggggtgataaacaggagcggggaggttgaagaatgcagggaaacgcctaagcgcaagacgcgtttaaatgttgaagcaacaaataaatagagatctactaaataatatggaaaagatgctatgtgcaaaaagatgcttaaaggacaaagggggattttacggtgaagctagaagctccaagtggggtgcgcggcaaaagacgtcagtggagaagtttgatatgtcggccgctctatcgatgtccagaatagtaaacactataattgaacacccattgtctattgataactccctgccgtaacatttgatgcatttgattacattcttggcattatccaatgtatattttcgcccattactctctctgaatcatcaccatcagtcccattagtcccagcatgactgtcttgagccaggggtgctcgctgagcatgatagtaacgtatccgaccataggtacgtagccacgaacactgccgacaatatcatcggtccggtgaagataatcctggcctaaccttgtcagtaaccttcagagatggccccgaatcttgtatcgcttaccatcagcatacagctcagtatcgtctgccaaattgttatcaccctaacgatctgttagcaatttcctaggccattcgaattgtcgagtcatttaccttggtgagaagcatatgcgagttaggctttgtgtccctagaacttcgttagcataaggaagtagccacaagaaaaattgccgggcaatgatcgaggacatacactgtgatttctttcaccttctttgcactcgcccgtccttctacctcagggaaagtgcgaacaaccctgtggacaatcggaatagactttccccgaacattataaacgagaacttctccgatctccgcccttgtgtttcggttccagagaaagagcaagtccccacgctgaaatgcgggctccattgatcctgtggaaagggaatgtgagctgtgttcagaccgccataaaaatagctttatttaccggacagaaccacaactattggagaacttgatgcggacacaactgaaaggcctttccacagcatgaaagccgtggaaagaacaagcgcaaagttcagcacttgtgcaattgattgccgagcatttgtgatgctggatgagagggaggatagcatggtgggcggttcgcggtcaacggagatgggagggttagggtaggtcgctctaatagtgactgttcttagtcagaaacggtagggagtttatttcctttgttttcctcatggtagatgaagacggtacctattgtgttcagctaactaagctggttgggtcgtgttttgatagagctagagggtgcggagatgtggcctcgtcggagatcgccttggcgcagatccactggccttccgccttgcaggtatgtataaccatcgtgtaaattgtacggagtaccacacctgagttcatacaatggatttcagctggtccagaaatagttaatattgtaccgaaatgaagcaatattgttagtaagaaatggctgcttgctatatccgtttcaggctctatctaggcaactctgtaactatatataactaatcatattcgagatatacatgtttttcgcggtctatatccttaatctcttgtccactcaaagacagtatttgttatgttaaatctaggcaatgatatacaaatcctaggctcttgcagatcatacaagaccctccggacatcctcggacatcatcggtcagtgcttgtttcattgtctgagatatggccacagctcgtttgatattccttatagaaaataatacatagcttgacatcataagcagattctttttgtctatttttctctgatttttccaagagtttcaccttttgggctgcgcgaaaagtcactatgaagaatgttgaagataggcatccctagaaatcaagtcactagactatgtctcatggctgaaattgtggtcattctccgcattatacaatggccaattacatacatggtagtgatgtttgaggtatagacttgatttcaaacatgtagcctgatctacctaccatgtcttagctaacctatcagcagatggaaatctggtagattataggtaaaattcctggagatattttaggtgattgacgcgcgcgtatctatcgccgactgatctctaaagaccccattgtgcatattgcaaggggtttcattcttcggggcaaggtttgcataaaaatgtccgagcagaagcattttcaagatgataaaagctcgaatcccacttttagattagctttcacacaggactgatgtactgcaaacaagggtgaccaagtcacacattattcattatcatttctatggtttgcttcaatatgcagtctatctcctcagaatcgactttatcgacaggcgagcccaaagcttcagccattgagctcctgcatgaccattatcttgagcttacccccgatgggaaatatgtgcgatggttgcgagatcacccaaggcatcctcgaaattggtctagcctacgaaagacttacgatattgtccttatctgtctcttggatctatttatgtatgaccagactaaatctcaatgttattttgtcaataagctaacaatactactagaacagcatccagtaccgcaggtgtgagtccataaagctatctatgacctaccttattgccgagctaaccgtaatattttctagtcagcagctgccgcagaagccaaacatgaataccatatcagcgaaacgctttcgatctttatatttgtcacaatgtgagatcagttggtcttagtctactttgcgtacctgacattaagcagatttcttctcggccaggtggtaggcaccatcttatttcccccgtggtcggagacatttgggcgcaaaaacatgtatattgtgagcagtggtctcagcgccatttgctgtatgataatcggactcgtccgttcaatgccggtcattatcatcatgcgcatcgtcgccgggcttctttccgcgatcccttataccatcatcggcggcagcatcgaggacatgttcaactcgcatgctcgaatatggaccatgtactattggacaattgcttcaaatattgggctcattcttggacccattatgagcagctatattattgcaggccttgattggtatgtagcacttaaccatggtctatgtcaatttctcacaactccccaggcgatggaacttctatatcttcgccatcattattactgcaattacgggtggtctctgctttattcgcgaatcacgaccttccttgttgctggcctccgaagtgaaacgggtcaccgatatgactgtgcaacatattccaccgccactcaaccacgaccatatcccggatctcaatacgtttttaaaagaagccctatttcgtccagcccagctgtttttccaagagcctatcattttcgtcatcgcaatgatgatctccatcgccatgtccctcatctacatcttcactgaagccctccaacccatctacgagtcaatgggatttgcaaaaaccgacgcttcactgatattcgttgctatcggcctgggaacttgcctcagcacattgacccgtgtgttagacagctacattctcaactatttccgcaggcagggacgcccaattaagccagaatataagcttgtcgggctaggacttggtggtccattcttggcgattggtctatggtggttcgcttggactattccacctgggacccaaactccatggattgtgcccacactttccctcgctctggtaggctatgcgctgacggaaatggataccgtgctgtacggctatatctccgatgcttatctgagttactcggccagtgctaccgctgctgttgcattcatgcgagcgttgctgtcgggtgtctttccgctgttcacgacgcagatgtttaaccggttggggaataatcttgctatgtctgtgcttgccgctgtggcaactgcattttgtatagtaccgcctgtgtttatcttttatggagagcggattcgtcgggcgagcaagtttgctcgatatagctgggaaattcaggaggagctgggtaaagaaaaagaagattggtaagcttgggctttagttactatctgccgcttactcctaagaatacgacttcagctctagcgaccaaaatacccgcagaaaggcctttcgacaatgtcaactgaatgatctagccgcctaaaaccgaatttgcggcccctcatttgcctagtatattctaactagtagtcagaaaatacctcgtcataactaaatgaagtatgataggacttcctaagagctctcggacattttgtgctaccaataatgtgattggtgagataaaaacagaccctaggagctcaagcaccgagcgatctttctttcggcaaaagttgatgttaagcaatgaaaaaagtaggacataagagagaaaaccgggaagaaatgagaaaaacagcaagagatacctccgcatagccctgattgatgtagtcattttgcatgagccagtcataggcagacgaagcgaggagtttaagaacaaacttgttggcacatagcttccaaggactgcacgccgatgataatatccccttcgtgttgatttcggggtctgcggaagatgctttcaaagttgagcaccaaaggtgtaccatggatttgcccatatcggtacgtaactctctgtgttggtcggaaagaggtatccatgtgatttcgggtcttatacggatttggggaaggtccttcggaccatacctccacgtctactcgccatgttggcttgcgagtagtggcgatgataactcttggagcgagagagaagtatgaagaaggttagattctctacaacgatcgagatctagctaaatagctaggtgaagcctgacaaaccagacatcggcatgtgatcggcacgtgaccaccacaacaataacgacgcacttggtgagatgttcagagttgctataccaccaatgggcgtccttgcattgctgggagtaggattctgatacgccgacttcaagggcaagggtaggtaatcccgccccccttccccccacccatcccatcaaagatatcggatggagagagccaccagtcaggctccttagccacagactttccttgagttcttggcgatgggcgggatacgaacgccccattgtcataggaaaggcccattaagaatagctggatcaatttgagagaaaacgccaatgattgaattgtgtttctcaagggaacattctacaaagcatttgagatacagactataaggaccagaccaacaaaaggtaaacatcataataacttctgaacataagtaaggagatatatcaacataaaatgcacctatgccccttcagcggtcttaatggtggtatcctctctccgagtcagactcgattcccaatacttctctttcttgcctcgactaacgatcagtccatagatatcaaatggatcgacaaaagtctggagccaatgacggggatcatcatagccagggccctcaatctcggtgacgccatcttcagcgagataaatcttgtttgatcgcggaagccagcgcatgggatgaaagacattcagcaaagtggtattgctatacatgagcacaacctcaaagatccaaaagtaccattcctgtttcaatacaggactgatattctcgaggtcagtgtaggcattcagactcgcggcagtaaagtattccactgtgcgatagatggtacgaatcgtgatgagggtacaactgcagtataacaccagtagcgcatgcttgatcttgtggttcaatacgcctcctcgggcgcagttgaagtggaatcggcccgccaaggccacaaagcctgtcattaggacgatttgcatgataagcgccgccttcagtagcgccttgcctatgttttgcgagctaacactagagtttgaacttgcgactcgggccgctccgtttgcggtaatgctctcgatggccacacctagggctatgaaggttgtgaatacgcggcccggatggattggggagtggtatgggatgtagtagagtatgcggcccaaaatgaagaagttagcaccctcatatactggtctagaataatcgaagattggttgtcagtagcgtatcccattatgggctggatactccttacggtccggcgagcagaagcacagtgcttgctatatagacgcctatatttccccattgcccgaacgctccaatagtccgcgtgataaaacctcccgtaaacagaagggcagaccatggaagaagtccggtgactttccagggcttatatttgctgggggatctggttaatttggagtttcataatgggtaggggtcacatacaaggattgatatgcatggatgccgccagagatagcgaagagaatcgcaaaggcaattgcagcgcctttgttaggtgcatagaaccacaagcttccctcctctttttttgtcagataaactatcaatcgtgattgacttgggcgactcacgataagatgaccttggttcgagcatagttgttgtagatctatatattgcttggtgcgaacgatcgatttgcgtaaaaacaccgcactgtgtagttgatgtaattgatggtaagttggagaatatgagtatgctcagactaattcaccacactatgtaggtaggggacgttagacacatatatatacaacaactgtatgggcactgttcactttaggtaagttcgtattccttcaaaagcctcatgaactttattttggctacatggctcctcaaatttcctgaatttacgaataatacggagtagtcacagccaatctatgcttgggcctaaaatgacttcgtatttgcctctgcgctatgctcctaatacgaggctcactgccacagatcttcgacttatgattcgccaactttatcacgctaatccaacctaagtaatctcgttttcgcttgcttgcagtgcatgggataggccttcagcgtcatcaatttagttcagctcctaacatatacatagtattccgtagagaggttgataaaaatgggcatgtaaaaatgggcatgtaaaaatggaatagctttgaagcaagagggccgggaagatgtcctgtcgtggaatcatatggctaccgcagtctatcaccaccagtactccactaggtttacctgtacattttgtaatatgattaaacgctgaaactgtactgatatgcgtgacgagaggccactgttgtccgattcattctttcccgcatacatagttgcacgtgatcttgctgttgtcggggtgactgatagcccaaagcggtaagcgcgatgttgatctgtggatgttctggactttccagtttgatcgcgcgacccgcacaccttcgaaggtcaacgtcacctgcgtgttgtctagatactcacgagccgcccaaaatgccgccaaaacagccccagacatcgctgttccaagtttaccttcggttacgccccccgatgaccccaaaccccaatgaatgtgaccgctttttgaacgttgaggcgccagaggcttcgcaggaggaaacagagatcgtctcgcctgcatcaacacatgttactcttcaaccaccaaatgacacgagaaagcgcgccgtcgagaggtttggtttcacaaaggtcttcgaggagaccgcctcgcaactggatgtcttccatgacactgggatggagcccatcatacgtggagtactgaaggagaaccgagatggcctagtggctaccctgggagtcacaggcagtggaaaggtctagtcccgtgtattgtaatatcgcgataaccaagctaacgggttgatcatacacagagccacaccattttaggatccaagacccaacggggaatgacccaaatggcacttgacgttatcttccgctctttagagtcgacaaacaagaccgatcatggtagcattacccccgtgatgcttgcctcgctggctgtcgcggacgcttctgaagcccaattgttctccgcccaaacatttctggaagctgtatatggcgaaccaaacggacgtacatcgagagcgcaaacaccgatgagcccatctcgcgccaatacccctttgacggtacgaaacccctttacgctgaactccccccaaggatccccaaccccacgaccaagcacccctggatcgtttctcccaagaccgagatctaaatctggaagcccccacaagatggatttgtctcatattaccagtccccatgacgctgctggatctggccttggccagatctcaactgagccctctggatggatcaccccaggattttctaatcctatcccctacacccactgcaatctatttgagcccaaatcagctaaatctcgactttatgtcttcaaggaacccacgcctgccttgaactttcctcgccgtcacatacgtgaacgaccatgcgcccttcctaggctgcccgatatgagccacctaactgtagatatggactcaaatgccgactatgtcgttttggtgtcaatgtacgaagtatacaatgaccggatctttgatcttctgtctccatcaattgcctcgggtcagggtaacatgtcccgcggaaataaccaaaaggatcggcgacgtcccttgctcttcaagtctaccgagggctcaccagatcggaaactggttgccgggctacgcaaaattgcttgcagcagctatgaggaagcactggccattttggatgttggtttaactgaacgcaaggtaactggcactggaatgaatagcgttagctctcgaagccatggcttcttttccctggaagtcaagaaacggacatactcaaagcgaactggtgaacaaaactgggctggaaacgccctcacggttgtggatctcgctggtaagtagattacattcttactgtaagtctgtaactaatcaatctaggctccgagcgtgcgagaacagcaaagacagctggtgccacacttgctgaggccggcaagattaacgaaagtttgatgtacctcggccaatgcctgcagatgcaaagcaacatacaggatggaatgaaggtatgtttggaactcatagttagtgtgctctttttggcagctgctaacctacaaagaccgctctcgttccttacagacagtgcaaattgaccgagcttttgttttcgaattcatttccatcatctcaccagatgtccagaggccaatatccccagaaggctatcatgatcgtcaccgctgaccctgtgggtgatttcaacgccacctcccaaattttgcgttactccgcattggctcgtgaggttacggttcctagaattccctcgatctgtgaatctattctgtctgccgcttctggcagtcaccgctcaatcagtgggtccacttcgccaaattttgattcagccgaagagctcgagagagctgctgctgagatcacacgcctcacacgcgattgtcacggccttgctgtcaagctagccgaagaagagattgcacgggctgatgttgagatgagattaagcgctgccgaagaaagatgtcttatgatcgagcaagatgtgcgagaagaatgctgggcagagatggatgagaaaatggaagaggaaaggcgacgctggcagagagcatgggatgagcaggttcgtagccgtggatcagctcaaaacttgcaaaatgctaataaacccagatcggtcgcaatgacgagcacatcgacaagaaggttgagcttgtatcccgcggatttcaaagtaagtctgccattgaggagcgaaatatgataactcttaaactgacctttctctccagtctttgaggattcggcgtcgaacgaacgagtggaagagcttgagcaagaaaacgaccagcttcgccgcaaactcgccgcttttgagcgtgagatgcacaaccaatccccgacaagaaagaatagacccaagaatgccacgtccgcgcggtctaatcccctcggccgcggtagcgacgttgaaaacgctttgcaacgcatggatcaattgaagcttgcagataccatgtttgctcctccatcgccaggatcctcgcctatcaagaagacgaggaagatgggaactcggaaatgggacctcgccccagaggaccagatctaagctgccttatcctctactccgccatgactgttacgatttattcttcttgtgctttgagatactcaagcttttaattcctatgtttattttggttaatacggaatgatatcccttggctaaggcgtttggggcaatcgatcctttgtttaataaatgttcatatttcatttccacaatcccagatttggattttgcgaatattgtacagggtagctcgtaagccattcaagccacctgtctcttaacgccatcctataggtcaaatagatcctgccctgggaagaacaccccatgtgctccataaaccggaaagaaaaaaagaaagcaagcccactcctggattgtaaagcagattcctcaggactcagaggatgtaatgtccatggcatcttgtttcccggtatctcgcttgtcggcgacatgctcaatctcagtatcattggcagattgatcgggagtgtggatctctctcttctctttgtgttcttcctccaactttgttccatcatcctgcatgtcctcatcctcgtccctatcaccctccccttcttcgccttcattctcatgaccaccctcatcgtcctcgccgtcaccttcatccgcaccttcatcaccggtccccgcctcctctgcatcagtgacatgagggaaaagcgccgaggtcccctcatcacctagcttcgtgtcctcattatcgctcagctcagtctcgtcagcactgccatgctcatctctttgctcaaccgagtcatccccagtaacagaaatctgcttggctgagccacgagacgccgaactcggcccggcagcagtatgcccaacaccctgcggagtcgcaggtggctccgtctcgcccgcagcaattattttactcgccacggcccggggagccagcttcgtgttcacgattgtgtcggcgcgtttttggatgtcgcggcgggcgattccctttgtccggccgcgtggtgccgggttatcggatactggaatgaatgttggagcagttgaggtctcgggaaggccgtcgcctagcgtgagaacgtggtcgactttcatcttttctttattttcctcggttggttgttcgaccaggtggggcgtgttgatttcgtagagtcgggcgtagaggtcggcgatcaggtcttcgaacatggtgattttcatgaggttgttgttgagcttctttagctctagggcatctcggagcagttccaagatggcctggctctctggccccagttgaggtaggctttccaagcgagctgtcttggtagagaactcttcccatccgattggtttgaatacgctttcttcgtgaccttcattgattttggctgcgcggcggatgatctttgcgtaagttagacaaatgtcttcccacagcttggtgtggttgaagaaatcgccttgcttctttctcacacggcgcaaaagttgatctaagcttgcacgatcgtcaagctggtcaagcaggccaacaaaaaagtacacgtagcgggtcgtgtaaacgaaatgtcgacccggacgttcaaattccggccgccagacctggatcgtaagtgtcttggtgaatatttgggaaagttcctgcttggcagcaatggcagcggtcgcgttttgctggtcgtcgtaaatgatatgcgcagcctatggattgtaagcagtatgaacaaaaaaagatcaaggtgcgggtgatatacctttacacccatacgatgatgccagttagacttgtcagcgctcttgtacttccgaaggacttcgagtatgtatgtgttccaaccctccatattctcaggggggtcgatcttacgggcccagggagttgcaaggaggatcttgcttccttcggtgggctgatattgctattagaatgggtccttcatatcaggagcgatacaacttaccgtcatgtttcctcgacgaacaagtttgtgcacaaaagagaagagtttgaaatgtggctcaaagataggatcagagcgtgagtctcttcgctgcggaagtgcagcaatggcatcgagaatagcatttatcacctcttttacttcgaccttttttggggtcgttctcaaggaatcatcgctggtgaacattttccaaagacatttgccaagcgtgtagtgagtcctattgagtgttagtactctttctaatgtccccgctctgtaaagtcccgttgaaaccacttacatccatcgcttagacttgtcaacagctgcccgtttgagaaggttgctagcaaaattccacgtggaataagctgacatctccttaaaaggcgttcccttgtacatttgttggctcacctcgctgctgtaatgacgagggaagtctacaacactgaagacccccatggacagcggctcgcgagaggatgagtagaggcggataccaaagtcagagtaaagatctgacatcgcttctctagtctctgccgttggctctgcagtcctcattgctgttgaaacagccatggcataacaatgaatagcatttcgctgcagtgctgccaagtccgaccggttgttattaatcttatcagctgtccatgtaatgtcttcatcaagctttgagtcataggtttgggcaagcctataccaggtttcccatctgtctgttccatgatccagatcttgtctgaagaacccgatggcgtcatcaagctcgcttgttggaccagggctgagacgtttctgggatcggaatttggtgagtgcggcatggccgagaaggaagaaccaccccttcgaagcgatcttcgcgttctctgtaggaactatcgtcgtcgaaagctctgtaataccctgaacagcacggagaagattggatgggttgattggagctttaagatatacattcacaaggcgacgattgaaagtcaactgaggtgtctgtgaagaagccttagcggggccaatcgcttgctgcatcttctcgatggtagtcttcaattcagacttgaacaagtccttcatattcatcttgttggcttgttgcagaacaaagtcgatcatcatgatcgctgtagggcgatctaatttctccggaggacatccatgatccacagtcccatcgaatgcagagaatttgataccgtgtaggtcgagaagtatttgacagacatcaaattcataatcacccttggtttcaaggccaaagagttccgatttcagaagtttcaagaacttcttttgcgaatatctgcacatcgatcgaacgcccaatgcattatggacggaacgaagaaaatggatgcggtcttcaagcggatcattgaaaagctccttgttttgagcaatcgcttccataaagagggtatattgtaagatccagcatcgaacatacagctctcgcattttttctttcatgttttctagcgatttcgccaacgagcctcggaagtcgcgaccggaaatctgccctactcgcaccgagtcctcgtaaaggataaagctatgtagaagcctcacgaggcgggctatagcagatattgaggtttgtaaatgctccatgtcgaaacagtcaaatgcttgttccgaatcttcgagaataagcagtatagccttggccacaatgccatcgagggctttcagccagcccaacagagctacttgacgatgttggcttgtttcctcaccgtgtttcgctgcctcaagttctgccattatcacttcgatgcttcgtaaatagcaagagacaactttaggagggtagtcaatggcttggtatgcctcctggagtcggcgccagaggaatagtcgcaatgtagcatctcctctatcgaggaaggcagccatctcagcgagatgtgaggtaggatggttcatgtcactctcggttggcatttcagcatactcgatcgacgagggctcaagaattggctctattgcttcgatgagagtcacgggatcctcagagtctgagttgaataccttggcgaaaaagtccatgcacttgagcttcaagacctcctggtctatcacagcagcggacaattctgacatcgtagcattatttatgagagtgacacttgggtctccaagggactgaagtatctgcttcaggtcttggagacagagcaagatatgttctcgctgtgcgtccccggcaagattgacatgaaatgccgatgcccacaaatggcgcaaagtgaggtttgattgggattcgccggatgggctgtggttgataaaatgatctatggatgaccgggctaacataccccagcgggccagccgatcacgctgtgcgagttttgtttcttggtctgtctcactgccaatattctcaactgaagcaaaaacatctagatgaagctcgtagatggtttgtatcatctcgaattcaaagaggtctttagccttatactcaaatggagctctatcgcttgagccaagaattcgagcttcaagattcgcaatcagttcgctgcacgcccggtaggtaaattcatcctcccgaactagaatctctaccactgtcttctttagaccctttggccacaaaaaattgacgtaagtcgactttgccgtcgaccagttcgaagtctcttggccgaagtccggcatgagaagacactttagccattcgaacaaagtttcatgggaatgtagccagtcagagttgatagcattggaaaaattataaagttgctccccggaaggaagctcttcctcgataactggcttccaagcaccttttcttgagtgttcaaggaaaacagccaatcccgacttgcttgtgccacggatgtccttcagcggagataaatcgtctttctgctgcatcaatcgagacttttcgtcatcccatgtcttcatgagccctcggagatcccgaaacaatcgcgtctcaatatcttggggtgtatcgcttgagtcattcgcagagcacttttctcttaggtcttcaacgctaccgagtacatcgataccgatcttcgagaagagggagtcgacagtgctaaacatccaatcatcggcattgacaaaaacctcgagacggtcttcgtaatacttgtcttgatcgaatgcaacttcttcaggtggtagagtgtcggcatttgactctcgggctcgggtccgtctgcttttcatgcggccgccctccggttcttcgttcgcagccgacgcagacgatcttttgcggacgtgcactatagagttcgtgtcaacttcttctgcatgagtcccatcttgttcggcctgttgatcttgtggctgcgttgattgacgttccagcgactccatcaattgcttttcagcactctgatcgatggacgactgttcctcgcctcgctcagagggctctttcgttggctgaagtaaattttcttcgggcttgccattactttcggttgcctcaagcatcacgtcggcaacctcattacaacccttgtgtccctcgttatctatagccatttccgtgtcctctgcattgtgtgtgggtgtggttggatcttgggagtttattgctggtaggataataccgatggaccgagtgggaaccgcagcgagcgaatcatgatcttcatcgtcaagtgtttggagaagcgccttgccaactgactcccaggtcgactcggcaggatttatctctcggcgtaaagcgtgcagggcaagagggccctttgtcggatttaggcatcgtaaatcggcaggaagggcgggcaaatttgggtatggatcctcatgctgtttgaggtatttcaataatgctttttttggcctctgggcggggatttgcgacgcagataacttgtcgaagagggactgcagcgtgctccgcaagcgttgctccgcgaatatctcctctaggccaagctgctctgaccttagttccaagcgattgtcatcgtccgctagcacactttccaagcaataccgagacaaacggtagctgtttaaggaactgctgagtcttgcgctttgcctccagaggttgagatctgagtcgtcacgctccaaggcatccccaaaagaccctaaagccttccttgatgcctccgtcaacttcctttgtgtttcctgctcggattcgggggtctgtggcgcggtttgtatggagtcttgtactgaatcgaggacgaatttgccgtgatttttataggacagataaagcgtttggaatagactagaggtagagtcgttgacgttgaactcagcgattgattctgtagcaagttcatcttgcacatcgtcgaatgcaccccttttgaaatcagagatcgactctgggtatttgaagatctccgaattgagaagagcttgataggcctccgcagcctggggataatgctctggcccttgtgaatgcagcttcagggcaccgtggtaaagcttcaaagcttcctcgatctgaagctccttggtgtcgtcaacttcctcttcgacagcctcatcgggctccacattcaatgcgacccagctcgacatggtatgagctccacgtagggtccctcaaatcttagctgaaaaagagaaatctggcgacagcatcggggaggatactaagaccctagactagatgcgggcaagaagcaaatcaattggttatcgcggacagcacccatggacgttatcacgcgttgcacccaatcggggaaagtgatttggggcctgggtgcctgggtgccttgtggcctggaacccttttcttagagagtaataacagttggggtattctagatcactcttcgctttcccctcagcgcaacccctgaaacgtcttacgattcacgcagcattcattgcattaagataccctcatcttcgattccatcgcgcttgtgcaggtgccatggtcgcgcccgctgttcctgagtatgtgctcatctccccatttacgtgttccccgggttgcgtatgcatggccattgttcgagattgtcaagagttgccactacgaaaattacaggaggtgtgactgacattgagaatataatttaggatccatgaggaggaggacatctatgttgccgtcgatgcgcgaacggagtccttgcagagcttgcgagaactaggccctccagacttggtctatttggtgaagcagcctaaggccaattccactcgccaggtaggttagaagataccaacttttctttcatgatacaatctttcatctgtgaacaatcgattgattttctatcgatcgcagaccggactttatcaccatgtcaccggaatcgacgcctcctcgtccgcgagcttagccgcctatgttaataccctcacattctctcccctcgacaagacgcataaagtggtatcggggatttactggttagaatctatttggtacagtgttgggttcccatgctgatgtctatacagttgctacaatgcattctcccatctcgatatgcgcgtcgaagtcaaaatccccggaagcttggagagctactgcattgatgagcgcggtgacaagcgagttgctactgaggctctttggcttgagaccttcctttgcgccgttctgagggcttacctctatgcggacgacggaagtggagattctgtcaagaagattgttggagttcggcgattcaaccccgtgacaaacacggagatggagcacaaattcttagatgctgccgaaaagctgttcttcttgggtatagatatcgaaccaatttgcctgctgtgtctctgactaacaacatttcaggccgccaactgagctctgaccccgaaacccaagtccctaacactgtgagcaaccacctcacatccggcatcctcaaatacatccacacgactggccgttatacatctggaatcaacttgtttgagaagctccgcacaaaggatgtagaggtttcatccctactggctcgtgtacagattatgacagacgaggaggtgcaagcggtacgcctcatgtacgacgctttgcaggatgttccgatggactatgctcttcttgattgccaggctagtttctgtcaaagcaaaggcgaaagcgaaatggcacttgagtgcgctaagcgtgcagttactgcagctccaagcgaatttagtacatgggctcgcctcgcagaggtatatgtcggtatggaacgctgggatttggcgcttctgactctcaactcgtgccccatgttcacctatcaagataaagatacccctcgcatgccacaaccgtcacgcatcatgctcccaattcttgctgaaagccttctcgatgaaatcgacgaaggccagccaaaacagggagaccctcacgactatgttcacccctcgcttcgaaagatccatgctgctagctaccaaggtactttcttaaaggcgtacaatcttctgacaaaaattgctgctgccattggatgggatcagttactcaaggctcgcagccaggtcttcgtgatggaagaagaataccgtgttgagcgacaacatgttcccaagcccgctacgaacggcaacagccccgccaacgaagatgactctagctctgtggctggccctgactcgagcgagccgtcttcggaagaaactactaatggagatgcgggagacagtcaccctgaaagccccctcgagcgaccggagcaaacagtagcatctgaagttgccaagtctggcaaggaagatgtatgtttaaaacaattctggacgaatttcataatgagctaactgtttgtcacagcccgacccatctcacgcttcatacacgcaattccgaaacaagcgactctgtgaaagatggctagataacctgttcatggtactttacgaggatctgcgcatctacaccatctggcggaccgaaatggcccagtcccgtcaacaagcaatggagtacaagaagtctcctaccgagtgggaaattcttggtgagcttgcacagagactgcaccatttcgacgaaagcattgaggcataccagagctgtctcgccactcggttctcgcccaaggctatgcgtggagtgttgaggttatacgaaaagcgaaatgacaccagaggcatgctcggcgcattgatccgtctcatcgcttggcaatatcgctggtactccgaggtatgctcctttctctagctaatattgctcggaccactataactaataaactattcagttctcccccgaacttttgttcctagttcgcaagctcattgaggacgagggtgctgtcaaggtccgcagcattgtccaagcgacaaacttgcctcaagccgtcctcgacctcacacaccagtattgtcaactatgtgccaccttccgcagcagtggtagcgacacttgaatatgttcgcgatgatcgaagacaagctgagttggagttggaggacaatttgatgccttcccctggatatcaagatagaaagtggagcacaggcagggctaatgaccacccttgatgacaccccttgttttgcactttctcttggtccgattgttagttttcttagatggtatatattttatatgttccatatctagtcgtgtgcgccattcaacatgataggtggatcccgtacggagtaaccctagtagtttggggcccgtatccatttaggcctcgacttctcactgcccaacgctagtatatgcatcggaacccactgtggagagaaacataggactcagccagtagcggcgatttctatgcacgtcatcttcaagtccccgagaacacagcgaggattggctacttccatgaactaacttgatgtccctgaatctagacacataggactctacattcacagcatctctagttggatacaggagactatcacagcaaaacaatccaatcacccactcaaggccgaattgtattttagttcaataaattttttgccgtaaagaaaccaaattctcgatagcaaaatcactgctcttcttcagccgcctcaatttcagacagatctgactccttaggaacaacaccttccttagctcgagcagcactggcagccggaacactcttcgtggcggtatcagcggcactctcttcctcggcgtcttcctcggcgtcttcctcaccaagctcttcgtctcgttcgccacttgcgccgttcgcgccctcggaaccctcgtcatcatcgacgggaatggcttcagtcttctgtttcttggctgccggggcgcctgaaaagaggtgtatgtaagcgtgggaaagttggggatgaagaggatatccataaaggctaagggtaaaacgtaccttcctctttgcctttctccttgcttttgtctttgcctttgtctttgccttctgctgttggtttttcttctgctccttctccttccccttcctcatcttcgtcagactccgactctccttccacctcttcctgttctccctcgtcgcttccttcctctacgtcgggttcggagtcttcatatctaattcaacgcgcgatcgggttagcaaagaccaattatgcttaggaggtttcgcgcgacgtgtttcgaggtcgtctcgtgatggaggcatagctagtacaaccgtgcagaattgtagtggaatgatgcgtaggacatgcaagaatgcgaagaaagggagaattgataacgggatggaacaacatatgaactcactcttcctcctcttcgctctcatcgctaggaagggcctggagctcctcctcagtctcttgctttctcttgcgggtagtcatcgtaaaaatatttaggaggttggtaagaattaacttagtacagaggggagggaaggatggaattataaaggagagagagagagaatgttctgaattggcaaaagtcccttgagtcttgggggggaatggtaattatagagaggagcagagctctaagaagaagggagggggaaacccaagagcataagcgggagtgacggtgacgacatgggagtgacaagaccttagggttaaggtgatagcttacactccggagtgcgtggtccatgacagaagtgtgcgtgtcgccaaccctggattcttgcgctatttacattccgtgcccatctaactatggtatccaaatgttgatatccttggtatccttgatatttttaggtttgcgtcgattccttgctttgcgggggtcttcatggtcattgtgttagaaagtcaaaatctgccatactcggatctagcagattctcatcaagaccaaatccgtatgtgccgaccattccatagatcagatccggtggagggaatccctgtgccatggcattggctcccccagggacctcgcggccttgcagcgcagtatcgttgtttccttggaattgccaagaagcctcccaagagtcaaagcgctcaagcatcttgcccaatccacgtgcgatatgtcgagtaagatgtcgatcaccggcagagacgcaattcattaattcgatcacacgttcaactagccgtcgcacttgtcgagcgttgatgcttaggtaagctgtgttccaattgattgcgaccttgagtaggaaaacagcggagaatgtaaccatagtgtgggtgaagatcggaacgccaacaatcgcatcccgaatatcaggctcctcaagaaccatattgagacatgccattgcggaggaaattgcgatgttggcggattccttgcggtccatggagaagacgggtgtgttggatagtgagagcgcacgaagagaaagcgagttcagctggaactttgcaaaatggtagtgcagaaccactcctttcgatggataagtccgcacataggtgctatcggctgtaatgcattccaagttatgttagaaccgagagttgctgagaattaggctaaaatgtcactcaccagatcgaggctgccagagaagtcgccattggtctactgcaacattgtatacgcgcaactgtccaaaatcttcctcagtcaatgtttgttcagtgtcgctaccaaacattcgatatgcctcagtcaaaatcataaagagagccacttgagctaaaagtcgaatgtctccggggacgatcatcggcagcgcgaggaaggtctcatagttgcggatcaccacatcctcgtggatgacaggtggccgcccataagcaatactgaagtgatggtcgcacacgtaaagcagataccagagctgcgcgcgctcatattgatccgtgtgtccacgggtcagacgctgataactttgatggagacccatctcggtcgcgattcgtactgcatgcccggacaacttccaactcaactctgacagccagaatgcccccacacagaggcctcggatatcatccaaggtgtgggcccgtgtgagggccatattggatacgagcgatacatactcgctgtagcagcggttcaaagtttccgtgcggttcggaatatgaagtgccgcgacagtcaaaacggctgcagaaagaagcgtcgatgcgcgacggacggacgttaaatcgcggtgtacaagaataattccaccccacagtagctggttcatggtgcgactgaagtacgcgaataattcttccgcttcatggagggagatcaatcgtcgtgagataaaatcttcctctagcaatgtctgtttcggtgcctcgacatgattgtttcttaggttccgtaatttagtgacctcgtatagactgcgcataggagcaggcactaattctgggtcttggagatcctgctccggcgacggctcccgagtaacatccatcacgacgcccagtccctcctggtgactgatttgtgtctgcgatcgactgacggaagggtggccatgatacgactcggcaggactggggccattgagagcctccccggaagcataggttgagagctcaggcagtccgccttgtcgcaataggtgcgaaacagccgcctgcagctgttgcatagtcgcattggcctgtgatttccatctataccagcgccattagaatagcgcccccgataggtccaaagcctcaccaaagggccggggcggggtcacacgtacatcccatcatcgttaacaaatttctgtgaaaagtcgtttacgacgcacttgataccgctgcgagtacattttgtacaagttgactctcctgaccgaaactcacagcgaatcttatgacgcttgcattctgcgcctattccctgttaattaggaggcattggagatgatgtggggaagactcacatgcacgagctttggagatcttggggacagaacgtgtcttgctctcttggggtgattccaggccagcgtcatcaggagatcgtttcagtggagtaccggtatccatgatgtgatgctactctagaggatagtgggaagagtcggtgatactccggcacgcagtttaggggagaaatcttctcccgagtggggggaaagcgtcggagtaaagcgagttggcacgagtacgccgaagagccagagataaattgcagtttatatttcaaggaggttgttatggccaatagggtaatgtatgtacaacatagcaagagaaaggaagaggacaaaaataaatcgtgtgacttgggaccccccgcagactcgacttccccgaaatcctcaccctagacgttattctgttgagatattgttggctttttaagattcaggtctgaatttcgaattggacatgttccttggatagagtctagtatatagcttattgtcctcgacttctaactgacaggctgacaggtcacaacacccgtggacaaggcattccccaggattcaaccccaattgagatcccccaaacaaaagagggccctgaaagatgacactccaaggcgattcgcgcacagcagttccacagcagatccacttaggaagtgagtcccggcccaagtccggtgcggaggaccagctacggatcgcctcggacttgatgcgaatgcggagactaaacttacatattgaaatacatcatcatcatcatccctcccatattccctcttcatcacaccaatctcaagaaaaatgcatgtcctcatcactggcgctgccggcttcatcggccaattgcttgcgaaagagctgttgaatgacccagcctatcgcgtcacactgaccgatatacatcaacctccgatccccgcgggcgttcgctatcctcaatccgcaacggcaatcaaggtcgatctcttgacaggcgccaaggacattgtcgattcttccttggacgccgtctatgcctttcacggcatcatgtcgtccggctccgaggacaacttcgatctaggcatgagcgtcaacgtcgatgcaacccgcaacctactcgaggcgctgcgacacacctgtcccggagtccgattcatctattcgtccagtcaggccgtatatggccgaccgttgccagagattgtgactgacagcgtaattccgaccccagagtcctcttacggtgccgagaagatcgtttgcgaaacattggtgaacgaatacactcgccgtaaattcatcaccgggtttatcctgcggtttcctaccatctccgtccgaccgggtgcacccactgctgcagcttcgtccttcctttccggcatgatccgggaacctcttgacggccagcaatgtgtgatccccattaaagaccgacagttcaagtcgtggctatgctcgcccaaaacccttgtggaaaatctccttctcactctccgtcttcctgcggactccgttcccccgcacattcgccagattaatgtgcctggaatctgcgtcacagtccagggcatgatggatgcattggaagccgtgggcggtgcagataaactcgcccttctaacagagaaggaggaccctgcgctggttccaatcttgaagtcatggccgacgcaatttgataacactcaagccatctccttggggttcaaacgcgacgagtctttcgagcaaaccgtgcgggattataaacagtcattgacacaatatagatcttgaaagttcaatgacatcgtttattagttgatttctaaactctttgtcattttacctgttacataaaacaaggaggtttctggtaactatagaccagggttgtgctagtcagtcagttgtcagcccaagtcgccatctgggcaccacccgcttttcctaccaactcacttcaactcttgggctgttcacccacttgagtgggatattctataattttttactccgaaaatcaattgtttcaaaatgccaacacaaatctcgcttctcgtgtacaaaggcgtgccagtagacttctccaaataccgacacacagcgctgcacgccctctactccgacggccaatatgattggcttcatgctgtcggcgcacaccctttcttcaaatttcaaaaggacacagagaacccgatttctgagccgccaatagcctggattcctgtatgtacggtgccggactctgtcactagggagaagattatttgtgcatgtgcttgcacgccggtgcgcaatggcaatagcgaccgagactggaactgccagaactgggtgggggaggccttgactgagctcgtcaagattggctgtttgaccaaagaagagcgcggagtggcgattggtaaaatggtggagattatcttagaagcggagctggaagacgtgagtcccgttctggataactgttctatgcaggaaattatgtggactaatgtggatttgttgcttgtacgtaggatgggatgtattagtctttatggcttttttctgctctggtcaactggtttcagctgtaggttgtcaatttatgtcatgccacaacctgggagacttcaacgacaaaatttcttcagagactgcagtaatgatatttagtttaggtctcttaatacatcgctagtcaaggaaacatagccagctgtacatatgccactggcacataaagcataacaccatcagatcggagacatcattgccaaacctgcgattctctcagcacgcgtcctggaaattgcatcaacagctcgcccaaacctgtccgtcaatggcaataagccgattaaacagctgattcctcgtctccatggcagtgagttgatatgactgccctggcatcttgccaatgatgagcaaaccgtcaaccacctccttaccatgaagagcccaaccaacaaccaatttccccttccatcccataccgcctaactttcgcatctcctggatctcagtcaccggcatagtgaacataaccgatccatctttgcgattctccaattttgcgtctccattctgcggcgtatcagttgtgaaatacagcagcggaggctccttggtcgagtcaataatcgcagtaccgcgcttgcctttgtatcgagcatcaaatgccacaggtccacttggtgttatcctcttccctctatcacgtaggacgccaacccgattcttagcatgatgtgaaccgattgctgctcgtaagcgatcgatccctcttttgctctcaacaccactggccgttgtttctcgaaataagcctagaatgctcgatcccaatgtccttttatggctcttctctggtgctggtggagcttcgaccgcctggacatggtcgtcaggcttaaccagtgcagcttgtttaatttcctcgttactagcacctagggtcagttcctccggattcaaagagactggccgcgagggtactttgtctggtgaggttggaggaggcggaagtggtgacgcattagcttcgccgatgcggagaagagtaatagccagctgagcatttgttggaatacctttcaggagggaactgttgcgagttagcattgtgagcatatgcactgattgaatgcatacttttgcaactgaataatcttccgccaattcggtaggcggcgatttagatatgaaacccctcgtctgatgacagggtctccaaagaagacgagcccgatcagaagtgtactcagcttcataaaaacgtagcaagatgtcattaatgaagctaggaatgccgggaacaacaccgtcgccaggcgcagacgaggactcagtcgaggaaacggagttgttgcggatagagcgctagataaacaaatttaacaacaagccatgagtaaaaccacgagctcttactcacttgcccatcttctcataggtatctgtgatgtcgcctattacgtgcattgaagagtttgcaatgtccatcacgctctgtttcataggttgtcgtgttttgtcatgggagtctgtcggtaccttcccatgggcagcgctttgcgcatcggcagtattggcaacaatatccatcgcgtctggaacgtcatcttccaagggtgcatcatcagggaccccttgatcatgcttcccaactgcgcttcccacggccacactggcaacgcttgcaacaagattactggcctcttgctcggctgcttcgcccttgaatttctcgggggccccggtaatactatcctcagacccaaggattcccgcctttggcttttgtacaccacccgtatctttgttgacaagagaaattggagcgggagggaacatgagtgatctacacggtggatagagcaccagggcaagtaggatgaccagcatagttggaacaagtagatcgagaaggcatgatagtacgtagacctacataatatcagtagcgctccaaatacatttctctagaatggagacataccgtgcaaaaggcagcggttcgtcgcggctccttccaagaccgtagtcgagcaatatgtttgatacaattggtcaatccaacaacaacggttgtgtaaaaacgttcaattgtagccctgagtttatccggcgagaattcatcgtcgtcttcacgcgtgaaatccagtttctgcagggaaacatcgggaactgctttgactcgatacatttgctggtgtgcaaattgacaaggtcggtttcaattctcctacattttcatgtggggtgctcaggacataccttgtcgaatcgtctaatgagcatccacaaatcctcatttgatagcccggccactaatggttcctcgatgacatctggagattcatcccatccaatattgctaatttccgctgtgtcgccagctttttgtgcaaggcctctctcatcctgttttatttgagatagcacatggctatcggttggtccctcgggaatttcaggatccgtagtgagattgttgtcggccttgattgtagcacggtcgactgaagcggatggcatcgcctgtctgtcggttgcagacatgagtgtgaaattgttctaaagttccctagattaacttgaagggtttgttttgaggtcaaccccattgagaggaagctttccatgggacctggaacctgtcttgtagttgcgcagactgtcgacgtcatcttccttcggtggcaatcaacacaaccttggaagcaaactggattattttaagtaacaaatgtcatagaataaattgtggtaataaggtttggctggtgaaaaagcactcgaagacatagacctgacttttattgtttgggtttgcgcgtgggttgacgaccaaggcggctggctgcacgagtgccattctgggtggtcatcaattctagttctaactgcaatgcaaaggatgaaaatgacctcgagatgtaaatgcgactaaattatataaatgagctcgttgtaaatcggcaaaccaagtaagatggatgcaagttaagagcagccctccccaggtggtcttacaaggattgcaatcaaccttccttatctctcttatcaacacgtgccagtattcccagaaaggcaacatcatcgcgtccaagcaaggagaactcatcttgatgataattcgctctactaatctgccatccagtcactggacactcgactcgccatgagcgaggagtgtgcaaaccccctactcctggggtggattaaagaatggctggatcaagctcgagaacggaatagcaaaggcgtgaccgtgtacgtatctcttggcgcccatcgggaaaagactatatctgacatcttgcaggtacaagaaggcttatgagtcaatgaaagcctgtccgttagaatttcaacatccgtctcaagcgcagcaattgaatggactgggtcctaaattgtgtgaccgcttgaccgataaactaaaggcccactgtcaagaaaatggacttccaatgccggaactgcctgggaaaggtttgtggtatcacttgcaccctggccccggaaacggacgctcaactaggtcgaataggtggaaagagagcatctgaaggcggcgtggatcaaccggcgaagaagcctcggaaagccaagccgtatgtaccgacattacgatctggtccatatgcactgatgttggccttgggaacccaaaacgagaatgaatcccaggggatgaccaaggctcacctgatcgaggtggcccaaccattctgcgacagttcgttcacggcacccccggacccgaccaagttctacactgcctggaattcaatgaaaactctaattcagaaagacctagtctatgaacatggtcgtccacttcgaaagtatcttctttccgaagaaggctgggaggtggccaaacgtctccaaaagacattacctggcgatgttcaaaccgccatgtttggctcccaagctactgcaacgactgagtcacagcaaagagcatcgacagccgaacttgcctcatttcaacaagatgatgatttattggcagacgctcaagaaaaactatccgaacacgacattgccaacatcgagcccatccttttcccagctaagagcttcactatccatctcgttttagacacccgagaagtccgcacctccaccgaccgcgactatatctccggcgaactgatcaagcaaggaattaagccgcaagtacgtgccctggaagttggcgacgcaatgtgggtagccaagtgtcacgatccaactttcctcacgagacatggcgaagaaggtgatgaggtgatgctggactggatcgttgagagaaagcgtctagacgatctgattgggtccattaaagacggccgcttccacgaacaaaagttccggctccgtcgctccggcatcaagaacgtcatctacctgatcgaagagttcgcagtcacgcatcctgactcgactagcgggagtgcagctcaatgccaggagatggttacctcggccatcgcctcgacacaggttcttaatcaatactttatcaaaaagacgaaacatctggacgagtcaatccggtacctagcgcgcatgactctgctcttacgaaagatgtatggggtcgaagatgcgccctccatcggagacactgatagcaatatcaaccgtagcacggttcctgcatctccagtatccaaaattggcctcatccccggccgccgtctctccactgactcctacctcactatactggataatctccgctctcaagatccgtccatcacatacggggtttcattcgtgaccttctccgcactcacttccaagtccgacgttcttactcttcgtgacgtatttcttaagatgctgatgtgtacccgtggcgtgacgggcgaaaaagcccttgagattcaacagatctggccaacgccacggcatttggtggatgcgtacatggctctagaatctaaggagcgagagatgatgatagcgactcggatgtcggaggttgtagggcggaagaaagttgctaaagatctcagcaagcggattgcagaagtttggggggaggtgaatttgtcttagaaaggttttctttcaaggctcctttgaagatgacatagtaccgagttcattcgcaggtattagatacaaaagtaacgccaaaatgaaataaatgaatatataccataatgcctacctcttccttctcacaatcttcataatactttctttgttaatcctcaaagccaagctactcagcacaacagaaatactacttaacgccatggc

SEQ ID NO: 57 - DNA, 4395334 bp, Penicillium roqueforti (residues 1,465,113-2,930,224 of 4,395,334)
  misc_feature (85030)..(85334): n is a, c, g, or t
  misc_feature (96910)..(97033): n is a, c, g, or t
  misc_feature (167455)..(168879): n is a, c, g, or t
  misc_feature (174643)..(174783): n is a, c, g, or t
  misc_feature (186873)..(192763): n is a, c, g, or t
  misc_feature (360706)..(360897): n is a, c, g, or t
  misc_feature (391845)..(392004): n is a, c, g, or t
  misc_feature (496629)..(496817): n is a, c, g, or t
  misc_feature (596161)..(596390): n is a, c, g, or t
  misc_feature (682712)..(683342): n is a, c, g, or t
  misc_feature (719014)..(719102): n is a, c, g, or t
  misc_feature (843400)..(843569): n is a, c, g, or t
  misc_feature (1092679)..(1092850): n is a, c, g, or t
  misc_feature (1157512)..(1162611): n is a, c, g, or t
  misc_feature (1192529)..(1192706): n is a, c, g, or t
  misc_feature (1228209)..(1228320): n is a, c, g, or t
  misc_feature (1338737)..(1338892): n is a, c, g, or t
  misc_feature (1570123)..(1570324): n is a, c, g, or t
  misc_feature (1572372)..(1573009): n is a, c, g, or t
  misc_feature (1778877)..(1779024): n is a, c, g, or t
  misc_feature (2068364)..(2068441): n is a, c, g, or t
  misc_feature (2226839)..(2227058): n is a, c, g, or t
  misc_feature (2309540)..(2309695): n is a, c, g, or t
  misc_feature (2399113)..(2399292): n is a, c, g, or t
  misc_feature (2467946)..(2468162): n is a, c, g, or t
  misc_feature (2498485)..(2498544): n is a, c, g, or t
  misc_feature (2576370)..(2576625): n is a, c, g, or t
  misc_feature (2701158)..(2701378): n is a, c, g, or t
  misc_feature (2766258)..(2766373): n is a, c, g, or t
  misc_feature (2901097)..(2901361): n is a, c, g, or t
  misc_feature (2994151)..(2994296): n is a, c, g, or t
  misc_feature (3046010)..(3046130): n is a, c, g, or t
  misc_feature (3064156)..(3064486): n is a, c, g, or t
  misc_feature (3130941)..(3131099): n is a, c, g, or t
  misc_feature (3154875)..(3155622): n is a, c, g, or t
  misc_feature (3156577)..(3156888): n is a, c, g, or t
  misc_feature (3186839)..(3187499): n is a, c, g, or t
  misc_feature (3198386)..(3198657): n is a, c, g, or t
  misc_feature (3203091)..(3205065): n is a, c, g, or t
  misc_feature (3205792)..(3206104): n is a, c, g, or t
  misc_feature (3207550)..(3207708): n is a, c, g, or t
  misc_feature (3257243)..(3260840): n is a, c, g, or t
  misc_feature (3261646)..(3386645): n is a, c, g, or t
  misc_feature (3388107)..(3394537): n is a, c, g, or t
  misc_feature (3513814)..(3514144): n is a, c, g, or t
  misc_feature (3520662)..(3521054): n is a, c, g, or t
  misc_feature (3528475)..(3531029): n is a, c, g, or t
  misc_feature (3533420)..(3533531): n is a, c, g, or t
  misc_feature (3543907)..(3544094): n is a, c, g, or t
  misc_feature (3640708)..(3640899): n is a, c, g, or t
  misc_feature (3767906)..(3769628): n is a, c, g, or t
  misc_feature (3862252)..(3862586): n is a, c, g, or t
  misc_feature (3867623)..(3868260): n is a, c, g, or t
  misc_feature (3873822)..(3874513): n is a, c, g, or t
  misc_feature (3907202)..(3907429): n is a, c, g, or t
  misc_feature (4023279)..(4023435): n is a, c, g, or t
  misc_feature (4214328)..(4214473): n is a, c, g, or t
  misc_feature (4215560)..(4216072): n is a, c, g, or t
  misc_feature (4384376)..(4386795): n is a, c, g, or t
  misc_feature (4389220)..(4392733): n is a, c, g, or t
  misc_feature (4395332)..(4395332): n is a, c, g, or t
cagagcagcccacaccggactcagtctccagtgctcattggtcatgatcatttcaccattaatggttttatgatgatggccactcacgataggatagaggacaccagcagcaaccggaaccaaacagaggttatatataaccgcccagccaaagttcatacggactcgattgaacacacggcgactgagcaggaccagctccaaaatcgtgctgagatctgagttgaggaggatgaagctggcggaattgatagcgacgtcggagccagatgccatggcgatgctcacatctgctgctgccagagcgggcgagtcgttcactccgtcgccgacgaaggcgacaatgggacgtgaagggcttgaactcggtgtagtctcaccaccggccggtgttgtattctgcgaacgttcttgaatctgacgaacaaagctggctttctccgctggtaggacattggccattaccttggagcgcgggatgcctagcatgtctgcgacggcgtgggcggtagtctggttatcgccagtgcacatgaagacatcaacttgacgcttctgaagctgggagattatctcgacagcttccgggcgaatcgtgtctgatgtggcgaagataatagctggtataaagttggatggttcggtggatgggggttgtacttgacgtagtgaaaggactgcagtagactttccagctgactggtatttcgccagcagactggaaacgaaatatgtgtctgtttggggggatagtagactgttgagaagacgttcattgccaattgcggcttcatactgcccttcgtgctcggagccagacacagtaaaagttcctttcatgccttgcccggaaatctcatgaacgtctgacgacttgacagaggaagatttttgtgttttgcagaattcagtgattgcctgggcaatcggatggttgctgctctcttccattttccgagccagagcccatgcgaccttcgcaacttctgggtcactggtcaaaacttcatgttcagaaaccttcagacttccaccctcagtcaaggtgcctgtcttgtcaaagacgattgcattcaagcgactggcttcttggaaggcttcaccaccaccttttaccaggataccatacttcgctgctaggccgcccccaacgaaaagcgctgtaggggctgcaagggccagaccgcagggacatgccaccacaaacactgaaatggcaaattccagcgcccagaatgtccagccaccatgtgcgacatcgagataatctgcggggagcacaccggaatgaccaagtgccaaccaaataacgaaagtcgaaatggcgatcagagtaataataggcacgaaatgcgaagtgagaagatcagcaactctttcaagaggtgcacgcttgctttgcccctcacgaaccacggcaatgatttggtcaagcatagatgaaccaccaagctcagtaatacggatccgtaccggctggccgacgttaaccgagcctgtatagaccatgtcgtcggctgttttcttgactggtcgcgattctcctgtcaaagagctttcatcgaattggtatgacgcgctgtcgacgatgactccatctgcaggaggcgaggcgccatggggaatactgacgacgtcaccaacttccagcaggtcgacattcgtacgcttaactccatcttcggaagtgtcatcggacaacagtgcctctgaaggtcgaagcttgcccaaagatgtcacagcatcgccagttctggctttactgtaggcctccaggaagcgaccaccaagaatgaacagagttaagaagacaaccgagtcgaaataagtcgtgctatgggggctcgacttggtacccacaactgcgtcaacgataagtaccgccaaagacgagatataggctaccgatgtgcctgcagagatcaaaaggttcatactaccaaaacggtagaatcttcgaaggatcggcactcgacttccaggccgccatagcgcataaacctccttcgcagcacggacatggaacacatcagtgccgtagaacatgacaggagttgacattataaacagcgcccattcgatgcgggtcacactgccagaccacatagtttgctccagatacattcgaacagagttttcagatgagacaagagacataaatacaatccctatgaagaaagtcggaatggcactgataaagacgaaaagcaatcgcgccaacagacggcttctttcatgatgctggatcgcacgagaccggtcttcaatactaggcgggtgataaacagtcgcgcgaaaattgtcattcgccgagttgatcgctgagattattttgcgaacggtaagaaatggtggctgtggagtatatgtgattttgacgatgggggttttctcggagagtgcctcctcgatggtgacaccgggaaccgatttcactgcccccaaaacagtttgtgggcaatggtgacagaacatcccatccacttgtatagagattgttctgatatgggcagtgctgaacttttcggtaccaattttcaatggagagacactattgacggtggcatcgtatccgaggtcttcaatcttctctatgattttatcaagattgtctcggccttcaaattccaccctgccgctatgggaaagcaggttcacagacacatcacgaataaaaggaagttcttcaagtcctcgagtcacccctccgacacaagagccacaggtcatgccggtgattgcaatctcgctgacgtagtttgctgccagctctgcagatgccggtggtttggggacttggttcacctcgtcaagagatgcttcgaacccagcatcattaatttgctcaacaatctggtcaacattatcgcgaggtccaacataaattactgttgcgctgttggtgagaaggttgacagtgattttgttcacgaacccgagttgttgaacctgtgcggtgatgctgttggcacacgacgcgcagctcattcctccaatgctaatctgtgcggtgaactcatcggatgattcagcggacggactaggatgtcttgcgatgtctgtgggtaatattgaagcagacacatcaggttgaacctttgctttggaggtggcgaatgaacggagaccctcctgcacagcatcctctggggttgactcaagctttgtaacagtgatgtcttcttcgtgctgcttgcccaatggtcggaagggaatttgtgaggacttctcgtccaaagatcctagctccgttcgagaagaatgacgagaaaaggtctctagctcttccttcctgcatgcatcgcagttggcaatatgtcgtttatgtcggctcgtctgaattcgctctttaatattggacgagatactagaaacagaggttcgcggcgaggagaagagcgtagagccgcggtgattccaggaagaggtgtcgagttccgcgatgagccttcctcgttggtcaaatgtcgttacatagtgtacttcaaacgcggcatgaatcagcgcgttgacgaggtcggcaggccgaatggcggaactgtggctcgcacgcacttcatgcgtcaaaatggtgacttcgatgttttcgactgtaggagtctcagagagcacttcggtgatatatgcaacacatgatgtgcagtgcacattcgatacaaaaaagacactggtctgggtatcaacctcttgatgggctgcctccagatcgaaagacttggtgttgggttttgatgacatgactgacggagatctctgcgacctaaagatgaggtacagcgtggaatatatcgatcttgcaagtcctcagcagagtcgatgattcaatatcgctcagacaaggttagaaacgggcagttgtcgggattcagtgtttacagagcggcctgatatcaaggtgaagggaagagcgattataaaactgggcagggaaccttttgcaatgcagtataatattccactaagaaagaaaagaaagggaaaatcctagaagtgggtggctaagtttaaacatggcgaagatgcgccatttgtgcgcgattcctccaaaccacgcacaaataccgcattccagacatgtcgaccatgacccctgtgaccactatgtagtatgtcgctagtgtcgaggcaggcaatcaagaatgaggccggattctcgtattcgacgttgtaaaagcaaccacttcatgtggagtaccaagtctgatgatgctgttgcagtagcagtcatggatcatctaggaacctcaggcaccgaggcgcgacaaagaccagacggttctaagcctaattgggctagcgtaccctgagccaattaaggtcacgtgattcatgaatggaatccatcagatcagccatggagcaggagacaagcgacaagagataaaggaactgaactgaatcgagcgatttattcatttatacctgactcactcactcctggttcccgacatccaatcagctagaacttcaagtcgtatgtccgaattcagctctgcagattccggccaattacataagcaggttgaatacttttttctcaccttccactttcccttatcgcgattctcgtgacagtcgataaacccttcgctacaaaaaaaaaaaaagaggctgcgcgacgtccagttaaagaattctgaggctgtgaggactcggcctccatcgagtgcccctgtctacattcaatctctgacctcttacttttcgctttaaccaacatgtcggcacccagatccggcgcgcgtccaatccctccccgcgggccccggcctcctatgggacgactggccagtctaaaaccccccaactctactcctatcaatcgtccaacggctattggacgctctcaaccaccccgcccgacaacacacccgaaaacatctaattgtccaaacccaggatgccctgctccgcatattgtcgatgatggaggcgtgagggtctgcacgggctgtggtacagttatcagcgagaacaacatcgtctctgaagtcacgttcggggaatcctcgtctggtgcagctgttgtgcagggatctttcgtcggagaagatcagacacatgtacgcagctatggtccgggtttccagcgcgggggcgccatggagagccgggaaatgaccgagcaaactggaaaccggtatatgcttcaactttcccgggctttgaccatcccggagagtgcgaccaaagctgctggtcaggtgtttaagcttgccgtgggactcaattttattcaaggtcgtcgcacaaagacggtagctgcggtctgtttgtatattgcatgccgtcgccaaaatggcaataccgtcatgctgattgactttgccgatgtgttgatgatcaacgtcttcaagcttggtcgtacatacaaggcacttctcgacgaactccgcctaggtggcaacgtctttctcatgaaccccatcgaccccgaaagtttgatttatcgtttcgcgaagcagctggaattcggaccctctctcatggcggttgctggggaggcagtccggatcgttcagcgaatgaaccgcgattggatgaccaccggtcgacgcccagctggtctctgtggtgccgcactgattcttgccgcgcgaatgaacaacttccgccgaaccgtgcgtgaggtcgtgtatatcgtcaaggtgacggaaactactatcagccagcgtttgaacgagttcggttccaccgagagtggtgaattaacagttgatcaatttcgttcggtccaattggagaacacccacgatcctccatccttcactcgcgggcgagaaggtcggaaaattcgtatcaagaagttgccagagactgcggcggaactcgaagatgatgactccccaacggaaagtgaagcagaatcagtgcagccgcctcgtatagatgccgacggtttcgctattcccagtctccctatcgacccggctttgactgcaagtagcctcggtcgacgtgcatcaataatatccaaggcagtgaatgaagtcgttgaagatatcaggaacgagccgatccactccaagggcaagggcaagcgacaacccacgccagaaccatctgccgagcaggttgcatctgaagcggcgctggaagatgaaatgcggtctatgcttgcccaaggatcatctatgattgagagcgtcggctccgaccaacccccgcggccgaccgtttccgacagcactgaaatcgatgctgccgagtttgaagatgaccccgaagtcgccaattgtctgctcttgcctgccgaagtcgagatcaaggagtccatctgggtgacagaaaacaaggagtacctccgcactcaacaagcaaaagccctgaagcgggccctggaggagtcaaccggcgggggcacacctcgcaaaccgcgcaaacgccgccgtggccgcctgggagatgtcacctatctggagggtgagggcgaagatggccgcagctcccgtgcctcgacaccggctgaggcgacacgtcgcatgcttgagcgccggggctacagtaagaagattaactactctcttctggacacattgtatgggggtgaagggggagatgcaaagacacaaagcctgagccgaagccaaagtcgcagccaaagcgtcgtctcacggcgcagcgccagcatcgaaccgcaggcagccacacgatcccggcgtgcaacgccatcagatgccaaatccatccgtcctggttctaccgcaccactacctactccgccgtccactgctccagataccattcagggtgcaaagccgctcatagccaaggatggccccatgaacaagcttgggacagatcctgaggaggatgaggatgaggaggacgactatgatgacgacgacaaggatgatggcgtcgacgacgcatttgcaggcaattacgaaagtgactatgactatggcgatgatgatgactgagaaagcagacctcagaagtccttacgagcattttgtcatatgtccttttggtggattggagttgtgaggatgcgatcggcatccacttgctttctttgtcttctattttacggccttcgagatgataccatgtacctatttcacccatatgagcattggggtttccaaatttaattatcgtattaatatctcacggttggaattggcaccttgctcggttgcctcgacgtgctctaagcaaaacactcgctgaacctgagtagtatcaagctctagcgcaccaatagtaatgatgattatcattataccacaccattttcccacctatttacctttcacctattccatgattgtaggtaaatattacttgaatggtcaaccgtgccaccactagttaactacatcatagttcctgctttaggtaatgtagcttgactgagcatggtaagtattcggttccttagaaatgcccgcgaaaggcaccaggtcctgagtttagcatctattttgggtttcagatactcttgacataagcaggtgaggtaacaagggaagttagaagaatagactgagatgagaaatctaataggtaccgacgctcttggctgggtcacaaatgacaacgggcctaggaagtcaagagctgtcgtcaggactaggtatcaaagtgggcttatttaacgaccaggaacatgtacttatgtacatctgtatacctcctgaatgctagtgaaagcaatcatagttcgtacaaccaatatacgaaatcaactgggctggctctaggtgatttgttcttaggcgtaggttttcccctgctataactcgcataggtgtataatacaaggaactcgggtttattatggtattcacgccagaatgatttcaatctttttgatttggtgagatagatagtcgtaaataaataacggttgtcaaaagcatgttgaagaactcccagattacgacgccattttccatgaaagagatggaaagcaaaccacccaaaaccatcaaactctccaccgggcgggaaccgaattgggccggactgggtcagtcaggagcgtgagtctcataactaaataagcaatagtgaagaaatcttgagaaaatgtttttaaaaaaaaagaaagaagagaggaaaagaaaatatgatagaacagtcggaaagaagaccgagatcgatcgcggattggttggatgtcgagtcatcgggtcggatcggtcgatgtcgtcggatggcacgggattgagaaatcgaatgcatttttggaagaagttacgagtcgatctccattcccatttccgcgcctccgctcagttcgtcgaggctcgatgcttgcgggttgttggacagggcttgttggagaagtggcaagccagtgtccatggagttgaaggagacaggctgtgctctaggccggtcggtagctccgaggggagtagagccctcgaatatgatgggggagctacgaaggttttgaagacatccttcccaagaggaggcaacgagctggccttgagtgaggtcttcggtgaagagataaaaggcaggcaaggatccagaagttggagtggcagccacaagataggcgttcagagcgcggcttttcataagcatctgggagccgtgcaggtgggccgagtattggttgtcgatatacttggtccagccacgaacagcaggcgccatgtcaccgtcagtgttgacacgctgccagccgatacctaggagacgagtggcatcatctactaggggctcaacgggcggggcagggcctgcattgagagtgcggtgctgatcgttggacctagggtcgtccaggcgttgacggatcgaggacagtgcaatatcatccagacctggtgcagatttatcaaggcgctgagacttgcggcttacttcagcagcatcagaaagcagcgcgtttgaccgcgaggggacaggtgcagcagcagcctgttgcgcctcagactcttgttcataccatgtgccggtttgactctcggcagatatcgcaaggccagtctgcgggtttaaaagagccatgccttctccatagataggccggaccttggtagctggcaccgcctggtgtgccagaggcgcgctgggagcaacggcgtcttcaaaagtggcctcatcacgggatcttttgcgggagggcttgggcaccgcaggggcagacgataaattgaagctcgaggggacagacggtgtagagctattgttggtgaagacagggctggtgtttgtcggatagctgttgaagctccctggggagtcgaggaaagaggactgggagaactgagcgaaggcgtgttcccggggaggagagaggaccgtgaccggcccgtctgagaggcgattaagaatcattggagacattgttgctcggaatcgtcttatatttaagccaaagggaactgttctgttagattaggtgagtaagacacaagaagcttcaaccacctgtggaaagacggaagtaagagaggtaaaaggaggaagatatctcggtaagtaagtagaagaatatatatagatgagggagaaaggtgggtttgagagaaaagagaaagaattgggaggagaaaaatgggcgaaatgggggaaaaggaagaaagtcgagcgaagtaagagtaagagcaagggtaagagcgtgagacaggaaagaacgatctgaagaagtggatgaatcgatgcgcgaaatgcggaggtaccaagccgaacggtaatataccagcaaaaagcagctatccgatcggccgtaacggtaatgatacgtgccctattaacgggtactattggctcatgcagccaagacctcaagtggagtcgaggtggatgggtccaggccagaggcgatcggcctatgaggacggacctgtcgcccgcgaggattacatcacgtgaaattcataaaagacgcatacatatatcacgtgctttatgtgaggtcatataaggttcaagtctattgagatactataacgacatgatgggaaaaaagaaaaaaaaaaaaacacaacgaccacaagatcaggtccaaagcaaaccgacaccagagctcgtgcaagtttaccatcaatcaatgctcgtagaaaaaaaaaaaaaaaaaaaagtacactgccaacaacaacactttcatgtctttgtatacatcacagaaatgtggctggaaaaagaaaagattggtaataaaacagccaaaaacaagttcctcctttctccattgcacctcaggggcccatagagacaaaagtatgagcggcagtctctgcatgtaaccgagagacgggaaggaacggatacccgctacataactgcacttatcctctcgtgctgtcgatccgagaatggatattgtggcttcaaacactgggtcgggttttcggtgttccaattcataagacggaaaaacaaggatctgataagtgcacttaagcattaccagcagtagcaccgccaaggtagcccttgacacggtcaacagagtcattggcgtagctgggagccatagagccaacgaagaggaagaaaataagagcggcagcaccaaagacgacaaatttgcgctgcgcagggcggttgttgccatagtcagcccaggcacggccggcagacgaagtgtactcgcgcatcttgtcgccgccaagcttgtaccaaacaagacccagtagagcaatagaataaccgaagaactggaggccagtgacgggagtctgccacaggaacatggaggcagcaaccaataggatatccttgaggacaccgcacagagtcatgaccagggaagaggtcttgccaatctgtagagagtattagtaacgcttccctcgggagtaagatgcgggttgctaaagtatcacttaccaggaaaacgaccgagacgttgagcaggaaagccacaacggcattgagaactagaagccagataccaacggagtagacatggtccatggtgacatgggggaattccaagaacagagcaacgacaccgttcatgacggcacagatgggggcgaagtagtacagagaaaccatggggtccatcttaaagtcggcggagctaagcagaccctgtaccatgaccagacgggtggcctcgaaaacgataccaccgagctggaacaggaaaccgaccatgttgaacttgatctcaccgaaggaggcaatgatcacaccgatcacgatgatggagacgttggccaggaccttcatgttggccggagccatgcccataccccaggttgcgaggagaacagccacaggggtggtggccttgagcatttggataaaggcaacgctcaggtagaggtaggtcatgttaccgcaaatcaagctcagactgaacattataccgatagggacgatagcgcggaggtagacacggccggtcatcttgaccttcttgcggccatcgaggacagtagtggtgcgagcgaggatttgggtcatgacagtagcgaaagacagatgccatgttgtgaggatgatggggaaacctattcacagcgtgaggttagtgccagtttcctcgcattgtatctccggtctgacttacggaagttggcatagtcgaggaggtacttgttgaacaggataacagtggaactcaaggtgatccatgtactatcaaaatatcagcaatgttctccgatctgtctggttccttccgatgttgctcacgtcacatagaccgcggggtggaatgtaatgcccggctgctctgtcttctccgctgcggggttgacagtaggcaaagactgctcccggggagtctcgccagaggcgcggaccttctcgccgtcgctcattgtaaaggtttgagattgatcggacaaaaagcgcttaaattcaaaaggtcgtggccgggacaggcttccttgactaaatgcggaggaagccacggagaaaagtgggcaagataaaaagggaattagagggaaatgatcactaaaatgctccaaagattaacgagtgcgacagaaagaccaaaaaaaagcgataaataaaaacgagcgtggatgaagaaagcgtgaatgaagaaatgatgatgaaggttgaagggatggaatggggtacgtactccgggagtaatttttttcggcaccaaacattaacttcaatttgggggtttgacggagaaattaagggaagaaaaggcagttattgtaaaggaaatcgacaagaagccaaacataaaacagcaacgacaagaacagaaacaccaggtcaagagagatccactcgccgcaaacagaaagtgagaggagaaggctggtgtatgaatgtctgtacatgtatggaaagattggtatacgaattaccattactccggaccttggttacggctctgctaaggccacctatactcttcgcttataatttctactgttacgtagtggtttcatctgtatacccgttttaccagaaccaataccacttgtactttactagctcttaattttaatttgtgaggccatggatttgctcgtggcgacagtctccgactccccttttccctgaaataaccaccaatcacaccagcctagtcatgggatccactggccctaatcaacacgcttatccttaatctcaatcagattcccatcctaactcatgtgaatatctatataggtatgtttgacatcgacgaaaccatcggcactctcggaatgtcctaaatcaacgggtttgaaattcaaacccgaaacagcgcagatccaaattaatagtagggcattacgcaagcagctgttagccaaggcccaccagaacccgcgttcagtgaccctctggtccatctggtcccttacgggtggagaatgcggcgatccgccctctgtctgacgcaatcaggggacttccagccccccacaagcatattgtgcttggaccagtggtggtggggggaggagacccttaagcttttggtgttaacgggagttagtgtttcgagcggcaattggcaattggcaattggcggtgtttgctggttcgagaagttgttcgtcaagggggcgatcaatgggatcggttgtttgtattactttcttaggagtgacaatcagtggaaccagatgctggcattttgtaaatctcgcttctcatcgagaccgccagatgggatgatcaactctgcggatgttgctccgggaggattcaaggtgtttccttttaggacggtcttattgtattggctatttgatgcatgtgagacacagggacagtgtctggtgtactccgtacatcgtggtacaatgtatacacggggaaatcgatgtgatgaaacatggatcaccatctttaataataagttcaagatagcctcgtttggtctagcatcacccttgatggaggtccatacaaactacggagtaccaaagcaatattggcgtcctaatttaaccacagccaacaatgtaccaatgcctacatcggtggcgtttttagcccggccacatttgatcgagattcaatggttgccccctatccatacagtatcgcccctttttctctgttttcttttttttaattcttctagaataatgttctgacctgggattgatatgataacgggcattccagaggggagatactgaatgctatccaatacccactaggggaattctaatatcgactcacccgcatgcgaaaagtaaatgcagattccatgcactccaggtccctgcttttggaggtatcatgataagcttaagaccaataacggctttgcgctaaatgtgatgtgttcaatcttaaccagggtccttattacagcgtggtgagatgagattgccttacgcgttcttttactccagattacttgcctcttagattgagccctgcagcactgcctccccctgagtacattattgtaattgtaattgagcttgtcgatgtgatagggcctcgggagggcctggatgtgaggttaaaaaaaaaaaaaaaaggaaattaggccataataaaaacagggaataacaaatcataacaaatcaggaatcaatatcaatatcaatcccaatacgaatcagtaaagctgaaacaggcacgtcgtctccaccggatccgtttaacccacaaacccaggtgcgtctagatacccttagcttggccggtcacgttgtcctcccacttccccttcttctttggttcctccgcttctttgccctttattatccctccattccctcttcatcttctgcagattcctgcagctgtgcttctatgctgaacgtcgcccgcaagacattcaaacgagtccccagttttcaggacctcctacaaggcagaatgacccaccctgacatgtaagcacttgtccacccatcaacatccgtcatcgctgacaattgcttcgcagttctgttgacgttctcgtcattggtgctggcccaactggtttgggtgccgccaagcgtttgaaccagctcgtaagtctttcgctgcttatttactgtgtgggagaggggcacaaaaaaaggggggaggggtatccgggaattgaaaaagctaattgagtatacagaatggcccctcgtggatgattatcgactcaaacgagacccccggtggtttggcttccactgatgttacccccgaaggtttcgtaagttgcgactcggtctcaattgtcagtgtcaacactaacctagttcacagctctacgatgtcggcggtcacgttatcttctcccactacaagtacttcgacgactgcatcaatgaggccctccccaaggaggaggattggtacacccacgagcgtatctcctacgttcgctgccaggaacaatgggtcccctaccccttccagaacaacatctccatgctgcccaaggaggagcaggtgaagtgcattgacggcatgatcgatgctgctatcgaggcccgtgtcaccaacaccaagcccaaggatttcgatgagtggatcgtccgcatgatgggtacgggtattgccgacctcttcatgcggccatacaactacaaggtctgggccgttcccaccaccaaggtaagtcttgacttcacgtccctgggacggaaacatgctgatcgatgatctttagatgcaatgcgcttggctcggtgagcgtgtcgctgctcccaacgtgaaggccgtgaccaccaacgttatcctcaacaagaccgctggtaactggggtcccaacgctaccttccgtttccccgcccgcgatggtaccggtggtatctggattgctgtcgccaacactattcccaaggaaaacacccgctacggccccaataacaaggtcgagaaggtcaacgcctacaacaagaccgtcaccctcgccgacggcaccaccattggttacgagaagctagtctccaccatggctgtcgactacctcgccgaggccatgaacgactccgagctcattcccctcaccaagcagctcttctactcctccacccacgttatcggtgttggtatccgtggtgcccgccccgaacgcattggcgacaagtgctggctgtacttccccgaggatgactgcccattctaccgtgccaccatcttctccaactactccccctacaaccagcccgatgcctccaagaagctcccgacccttcagctcgctgacggctccaagcctaagagcaccgaggctcaggacggcccctactggtccgtcatgttggaggtctctgaatcttccctgaagcccgtcaaccacgagacccttcttgccgaatgtatccagggtctcgtcaacacccagatgctccagcccggcgatgagattgtctccacttaccaccgccgcttcgaccacggttatcccacccccaccctggagcgtgagggtgccctcacccagattcttcctaagctccaggagaagggtatctggtcccgtggacgcttcggcagctggcgctacgaggtcggcaaccaggaccactcctttatgctcggtgttgaggctgttgacaacattgtcaacggtgccgttgagttgaccctcaactatcccgactttgtcaacggtcgccagaacaccgagcgtcgcttggtcgatggggcccaggctctcgccaagaagcagtagataatgaccccttatttctttttaacttgtcccaccattcttgtctgaagtgaagggttcttttttttcctccattttttgatacaattgaaacgagctcataccgtcatgggaaaattatacacgagagagcatttgaagcggcatctggaagacgatcgatctttgttggcgtttcatcttgttacttaacaccatccaacccccttcaccctatcatctacctattattccctcttccattagccgacagccgggacttgcttttgatacacttttctagactgccttgatatgtgctattgctcattttaattcattcagttgaccgatgaacctcttccctttctaaaaatgcagtggctttctcgatacttagcacgtgacagtgttgcacgtgacccatatccgaccgctgcgacgtgctaagcagatctcaccctatgtgggcagagtgtttcgtggcatttctcaccccaccaataccattgctccctccagttacactcgccacaatgcagatcaccaaccagacaatcactaacacacacaccgcgagagcctatccccatgtatatccaagccatgtccacccatgaacctaggaaccaaaacccctgaatggcaggcccctggattcgacacaatcaatctaccggcaaatgccgccacagcgccatcaaccagacacggaaatataccggaacaaggcagttcaaggttattctacgcggtggcgtagtggatccgcgcgcagagaacgcgggtcaaccatgaaccaatcgtatcgaggatcgaaaatgtacaatctaaacggcatttcctgcaggcaaaagcaaagaaaagtccgagtacaacatcagcaaagtacctcagcaatgcagagtgacgtaggtcgggggtttaacaccattcttgtggtgagatgtgtcaatggctaaaagggcactgccgaggccgcgtcagatctggaggcaagccagttttgtggttcttctccactgaactattgatagatttgggttgccgatattgttgtttcagatatgaattgttgactgacattccagatcgcttcttttgcattttaacgtgagacattgtaatctggcccaaggcttggagggttatttttgatatttcttgtggtatgttcaacatgtctgggactgcttatgtgtgaggctggtttcaatatctcatattggtaattaaatattaatgcatacttccattgcccgtatagtcgatcatgaggttttggggcgagaaacatcataccataaatatacagaattagagtcgacaggtcagtacaaagccacaggtatcggtagaaaccccgctgggacagctcatggtggactcgaagtggccaaaccgccggaggaaagccaccaattccaagcacccacacgatctcttcatagggctcctatatggcgattttagtgtgagagccacagtcctcgctgatgctattggccgcactggcaggcgaaactgcttcatcggccaagactgcctcgtaagacatagtggacgctaaggttaggtcccggggtgggacacttgcggccggacttgacgacacaccgcacgacaagaatgaaacctgcggcgtcgaggctggcgagtcaatggacatgggtgtatatatagcatctgtgtggcttgggcggtggttttctccgtgactaaattgaacttccggtgattcgttagatggagcaggtttttcgacttcgggagtttgacatacctatctcttcttcaactgccttaccgctatggagctcgagttcgcaggcctgcggtgacagagcaaatttcaccttcagtcgcggtgggtcaacaaatcggtctgcttgcgagtacactccgatgggaattgtcacttgtaccgacgagtgttgggttggagatttgaggcatgactttgtcacagaagtgtgtagaattgcatctgcagaaacatggctattgtatcttggagatgtagactcaaaacatgacccgtcttgactcagccctgtggtatcaatatccacatccgaatccgtagagatacaggagctaggatatgggtccgtttcgtcgcagctctctaggtgcagctgctcgaattcgacagtcagggtatgacggatatagatccgctggaggtgagattcaacatccttttcctccagggcaatgatggttgggggccgtctgatcatgtttccagggatgaatgatgatcagtcgcacgaaagccctggagcctggaggtcccgtatatagaaacatcgtgtcttaggaagtcacgtatcttcacaatccaagaaacctcgaccaggatatgcggccgagaagatattgcaatcgcgaatgcggcgtagtccctaaatagtgaatcagcaaatgcgatagatgcctagatgatataaatcctatcaatccctgaatctgtgcaatataaatggtgtaaatgtatcccatcgactcgaaactggacaaatcagacatacccattccatctcaccactgaaagggattaaaataacatacagatatctttttttgtactctgaatctctctctccccctctaattctctagggaaagccctggagggaatattaatagtcaagtcaggctcagcccctcgacactagacccaatttctacggagcctcctgttgatccttccccctctctccagcgtcgactctctcacacacacacacatacacctctctctttcccccaactattcctcggatcatgcatccgctgcgtttccgatagcctgtctttcattgaccttttcgaccttgcttcccctgaatacctcggcacatctccggtcgctgccaaacctcaaatctccgccatgaacggagatctcagcctgtcccagactctgggagggcttcggatagccaatccagacgattcgcctcccccaacggaggatgcgaccggtgggtcaacagactctaatccgttcggagcgccggacggttcggtatcaacacaacacaatcccgcacatgacgaacacacctctgcctttcctcctgcaaccatcgaagtcccggtgacagacgaccgtcagacttcattccttcaaccctcccccgagataacaccacaatcaaacacatatcagccctattcggctccatccctctcaacgcctccgaatcccaaccgacccctttcctccgtatacgtgaatggctcagcaacctcggtcctccaccgtgagaattcatatcgcatccgaacagattcgggtgcttcatccaaatctgggtctcaggcgcgcttagacacacgaggaggctcgtcggcattacatgccggtgtgctggcgcgcgacaactcccacagcgaccgatcctaccggaccgcgcagattccgggcaacggcccggcggtgatgcgtcagtcatctcgatcacaagcaagaagtggcggcgcatctcagatgccacgaacggcttacatgccagaaaacggcccaatggcgagtagcgaggattggcaagaccgtggcgccgcggtctctgtgagaaaggaggtggatgccaacggccaaactgtctctcgctatatcaagaaaggcgttcgagacttctcgtttgggaatactctcggcgaaggctcctacagtacggtcgtcttcgcaacggaccggcagactttgaaggaatacgcgattaagatccttgacaagcgacacattatcaaggagaggaaagttaaatacgtgaacatcgagaaagatacactcaatcgcctgaccgaccacccgggtatcgtgcggctatattataccttccaggatgagcagtcattatatttcgtgctggacttgtgcaaaggaggagaattgctcggtgttctcaaacggatgaccacatttgacgaggagtgtacaagattctacagcgcccagattcttgacacgatagactacatgcacaagcgcggtgtcatccaccgagacctgaaacccgaaaatgtgttgcttgacagcgggatgcatatcaagatcaccgatttcgggacggcaaagatcctcaagactccacgagttgatcccagttcaaatggcattcttcctcttgactcggccgagcttacacaggaagagcgggcgagctctttcgtcggcactgcggagtatgtcagccccgagttgttgacggacaaaaatgcatgtaaagccagcgacctttgggctttcggctgtattatctaccagctcttggccggtcgtccaccgttcaaggctgggaatgagtaccagaccttccagaaaattgtggcactcgactacgaattcccaattggatttcctactgttgcgcgtgatcttgtcgaacgtcttctcgtcctagagcctacccgacgtcttcagatcgaacacatcaaaaatcatgaattctttgacggtatcacatggggtccagatctatggaaacagaaggcaccccgcttgaaggcctatgtaccccccgcgcgcgatcccatcaagcttaatgacagtaaaaacggggagagtctccctccagtcatctccactgcaccctcgaatgcaaatgccagttcccgccaccttccacgagtggtaaccgagctacccccgccgagtcagctcgatatcgaatggtcaccagtactgaacaaatccaacgagcggatcttaaaattgggtaatttggttgttctgtcttcggctgcctcgcacagtccgtcgtccaagaacagtagtggcgagtttgatgcaccccggaagttctctcgtttcttctcaggaagcgccacaaagaaacgacagcggttggtgatggtcacatcatccgggcgaatcattctggccgcatcaggtggtgatgataagaagataaagctcgagattcccctgcttgctccggggacaagttacagaagtacgacggattctaaaggaatttcatcctggattgtggacacggtatgtacttcatcctttatcggtcaaaatgacatatctaacgacaccccacagagagagaaacattatgttttcgaggatcccaagccatccgcaagcaacgccggcgccacagcgatccaggtacaagaatggctggacgcattggacaggtctcgggagatgtcacaggaacaaagcgcaggcttctccgacgatgcattccgcgacctttcctctgggttccctagtcccgccaatacgctagaccgcacatctgacatgcagaaagacgatagaggcccaccatcatctggtcggaatcacctagtgaaacagcaggccaccgatagcgagtcaacgaaaggaaggaaacgatttagcaagcgacattcgaagaatggtctcgctgcggtgttctaatgacatcgaataagaacgacacatattgcgatccatatatccacgtgccaattgcctttcggttttgtcggtttgataccgactttcttatactacctgccttcgcacctcgctatctcaccatttgaacacacctccacctgtctccccgcgtctctttttttcatttctcttcccatgcacgggcattcgcacaaagatgggttatcatctcagcgtatcggttatcctaccctttgcatattccagtgacaagcgtgttcttctgtttgtttgtgttctttgctggggaaacatgtttcttgcatttagatctggaaaggagcgcatactttttttctttgcctgactgcctatttcagacagaataccgattttcctttcccttgtcgtttgctatgtcttccgctgttatatatccctgatttggcctgaagcatcacaacatcgagcctttttctgttcggctattttcatttctttgttgttcctggtgagttatcaggctttattgaggctgacttattgattatctttgaaaaatatgaaatcaagactgatacgcccgcgtcctcattcccctcctcattttcttatacctcttggtgtgttgttttagggcaaatttgcacaaaagaatactttccttgcttcgatatcgtcatatctctccttgtgtctcttgttttccttggtccccaggttccttacagtggcatcttggtttggccgcattttcattgtgattttcttgctcgcttcattcctcttcgaattccatcctttgtctcccctcttagtattttctttgctctaggctgagagatgatatacccgattttcctattccgaaatcattattcaaccgtcttgctacaattcttatatatgttgaaatccataatgaaatactgcgcattccaagcagagtgatcttgaacaatgtacagtttgatagataactatatacaactaaggagacaaactagatacaagtagacatcagtcataagcgggagacccgtggacatcgtcccccagattagatgaacagccagtcgaggcttgtatgatctagctcctcaatccagtcaaactcaagatcagaatcattattatcataaccattctgatgctcacggcgcttgagatcctgtttctgccacatcagacgcaggacccacgcagcattgcggacattaacactcgtcatggcctcatagagtgaaccgagcttttcaaggataagagcccgctgcgaagggcgacactccgcgccagcaatgaaggtgggccagatgagacatttgaagtgggagtccgaaggggggatgagggagatttgggtgatgagatttgtggcgatgagtctatggtcgggtgggaggccgacatttatccatggaggcgagaagccttctctggtgcgcgagagaacacggcttgtgtagaggtagacggcgtcttggtatgaggttgcgagtgcgagacggtaggttaagtttgggatgaagaagacattttgcatctcttggctccatgctaccgggtcgaagtcgcgaattccttggaggaggctggcgaatgagtctagggtgaggggctgaccaggttggattggggttggcagcgctgttggttggggggtcatggcggcggcttcggattctggataccagagggcgtggacgaagaaaatcactcccaggagataggcgggacatccgacccaagaattttcctcgaggcgcttgaggatctctgggcccatggatgaggagtagaagggctttgagagcgcgcctggccgagcgagcgttgatcccatgatttccattctgtatggtcagcaagaactcttcgctataggcagagacccgaagcttacattaaacacccgtcaagggcaaaagcgtcgaggtcatcgagaattccttgtcccgggccactttcagggcggtccttgagaagcttcttcgcaccctcgatatgataactccaggccccgctgccggactcgaatatgtctatgaaggcaagcaatacgatagcagctaaggtcctgccgtccttctgcatcgccgggttgaggagatccatggataattggcgaagggcgcggtgcttgtactccaagaaatgatgataggcctgcgaagcgggttttcgagaacttgccggtgcaacaatatcttcaatctcctttactgacattgatagattgcctgatgaccatggtaggacagatgagtccgattctgatacaagggagcaatgaagagccccaagagcagcgatgctgctggcaagaacaggagaatgattgaccaatgcagtaagatctcggaacggatttttgtgttgggagtaaagggcgaagtcattaaccatatattgattgtcttacaagtaatcgtcagtggagccacagataatgcactggggaattctcacagtgatgtacatagtaccttgagaactgactgagatctttgagcagtggatctaccagtccccatggcgttggagtatagtcagcgggaggagcgccccgaggaacatgaacaactgcggtgtcctgttcctcgtgtgtattgacctccaagtgcgcaatttctcccccgaatgttggattttccgtctcaaaagtccatccatcggtctccggactaggctgtttcccagagctgtgcgattcggcatcggacgaggattcggggatagagaaaaagccgaacccgctgctcgctgcagtcgaatcatatatatgcgtagctggctggcgctttggcttgctaggcggtattcccacgtcatcaaagctgcggcccatcatctttcctcgactagccacaccacccttgacccaaacaagcggtttctgataccccagacattccttccccgcatctcgacacttccgacaggtgggttggccattgtcgcagataatgcgacgtcgtcgacaggtatagcagcctttggtcattctctgggcgttgtgagacaaacgtattttctgaactgggtagcgaagaactgagccacttgtgaagtttgttcagcgccactctccatcatcggtaatggtcaggattcggaggcaggatgtcgacaaagccacacgaccatttctagtcgtttaggaagtgactctggcgtcgacaaatgtcataaaccaagttgtcaatccgtcatgctccacgatctcttggatggttcagagaagcttccaaaatttgcggggaggatgactaagataatcttccgacgatcgagaccaggactgttcaagcttcttgcatctcaaccttctacttgctcttccatatcagttacacctgaaagctcatggtcgaatgctagaagaactacaagatggttttgaatctcttgttccgaagtctggaggtaagtgctttcgccttcgccactccgatcttcactgacattgttcgaacttagatctggctcactgtccgagtacgttgctccaatattgatgtatttttgcttgagcttgcattctaatacgatctacacagctccttcgaagtccgatcttccatcgtatggtgggccgagttcaccagaaagttcaacatattaggtacggggtgcctccggaggagcagggaggcactcatctcgagggacaaggtatgcctggtacaaatatttggtgacatagtgtggctgacctgttctgattagatatgaagtacaaaaaattccttgagcatttcaaggaagagctgaaggaccagatgaaaggaaacccgcggaacaaattttaataccccggcgcttgtatgatacgaaaactgatgatacccacatgaaaccgatacatattatatgctttgcttttaccttccgaaaatctggatttgtgcttcctatcatcattttgacccttgtgtcgacaccgggtatacagtgggatacactttcgcactccttgggttgcatcccttgtttaatccggagaatgaacttgatttgaatcattgacttgccccttctactattcccggctgtatttgcagtcaggctgggatccaataactggggcatatatatcgagtttcgggattgctctgaaggatgcgctgcagtaaccttggctacagacgcaatcaagattcgtcgaattgctatatttacatgtatatattgttgctaatttcgtgctactgaatcaatcagcaaagcagattccagcgtgtctatttcttcaaaaaatatgagaaaaagtacagtcgcgatgaatatcactttgaaccattcttattagtctaaatgactcgccgaataccaatgcaagccgatcatgctgaagccgaacccttcctcggtcttggggtcacttttcggtgattcacatccagtcgtctcctcataactcgaactcgggccagctcaagtgaattcttcactctagccagaacacgtcgaaggacaattggtctggcaggcctccagaagaccttctgtatttcccgggggctggtccgcatgaatatgacctcaaccacctgcagctttccgtctctcgggctcaggctcggactctgaattcgtttctcttttttttcgatgttggtaaatgcaacgaacttgcgtctaccaatttgctcggtgtgtagccattccagctgattttcattgccgaagaaggtcacggagagcatatttccaatgatgttcaaataattctcggtgtcgtactcattggagatatcggcattggaatccatgttgttcttgatttttctgtcggatagactagttcacgttagtattcgttgcaaacttaaggtggggtacagatcagttgggatggtactcactgggcgacaacgtgtgtaatattcgagagattgtaatccttgaatttgctttcgtatcgaacgtcgagggcgggaagcgaggttgtgatatcttcgggagaagagtgtatatcggccatgtttcttttgagttgggtagacggagtgtggaatagagtcgtatggcatacgctaattttggatgtgctaaaagctctaaatgtcgaatgaacgctgaatttgctgcagatatgctcagtggagctgttatatgcaaggttagtgaagtcaagttgaaataccagacaagaagaatatatttatattgagagctcccgaggagcaaaaggaacaacaaagagagactagattcatagtgaaatgaataaagaaatcataggtctggaaacagatcaagtcgcactatttccatctcactgcatggctattatgggatatttgccctttgtcgcccttggcgaggaacgagagctgccacttgttttgagcataaagaaagatccaaatataaggctgctatacttttcaattatgcagcgctacaagacggagtcttgaagtagaggctccgctttgtattacccctttgttgtcaagacttcaaacagcttcttgtcgatcgctcggctctcgagatgctaggtgaaggaattctttgcatctataatgatgaggtctcggtataatgaatcagcggtagcttttgctaatctcatagggggaatgttgggtatcagaagcatctcgacatctccaaataccctcaagagccgggaccatcatgtcgccaatttgacacatagtgaaggaatactccattcaactactccgtacttaagattagagctacgtatatgcggggacatcgaataaggggaagattcgtagtcagtcagtcagtcagaagtaatagtcgactacttcattgaactaattttacttactccgcacattagcctcaaatctacgcagtgaatgcgaaacgtttgaggtcaaccggtctgttaacgcttgtcggaacgggcatcgatacatcgccgctcatcctagggcaagagtgaaagaaaaacccttctacaacttgcattaccgaggtcttcccgaggtcttcccaacatgtctgacctgaacaacaaataagcagcccttaagtggttccagaagaggccggaaccccgaaattcaggctgtcagcggcacgccacatggaccaattggggttaggcgcaaaggactccagtttccaggtcaactccggctgtgtcggctttgtaaaattaagagtcgaaagggggtccaggtactcgagggattcgtgctacctgacacagcacggaaatccctgcaggctaggtatttcgcaggaagatgacaaccgttgattaggcgactagtggtgacagggtggtattgatgcaagatgtcatacggcggcttgatgaatgccaatgatatgtggaagatcagaggcagatcatgggagatgtgctaaatatggagggggcaagcgggaagcgaggggtacgtcgtcagacctgttccacatgttagattcctctttggtggtatatacaacataggttttgaggtcattctgcttattcacttattcgctgaattctctaactatggtctcatatgtattcgactgtgaaaaaaaccaaatctaaaataaaacatttgcacccacgggacaaacgtctgcgcgacccagtcgactccgtaccgtgtttcctattgcaggatcggccaatcagcggcgcaggtgcctcggcgcgtggatctggtctgagactagggcggccccattcggcctagctccctttcaaagttcgggacaaacacagcccaaaggctgccttttcgctttgactcctttttcattttcctgcatatccgacctcttttatcaatttcttgacttcgggtcaagtcctttcgttctgatactcacactcgttatccccaaccatgcgtctctccagcctctcgctcttcgtccaggctctgctgttgactgcggtcgcagcccagagtgggattgtttccaatgtcgtgtcggatctcacaactgagtccacttcatccacctctgatgccccgaaaacaacatcgaccgctgaatcaacttccacaacctcggaagagacttctacaacggacccaactacttccgccgagcctactagcaccccgacttctaccacctccaccgagagtaccactagcgctgatcctaccacttcgaccacttcgaccactgctcctacggctgatcctaccaccgattctaccaccgctcctactaccgctgctaccacctcagcagagccctcctccacagcggaggctaccgtcccttcaaccacttccaccgctgattccacctccacgtcgagtactggaggcgatagcaccacttctcagagcaccactaccacccagaccccggtcgtgaagaccatcacctcctacgcgaccagcgatggatccaccatcgccaatgtagtgaccaccacttccacccccgttgcttctccctctcttaacggcgacaagagctccggctctagcggtgtgtctgcttcggacaagaagatcatcatcggtgtcgtggtgggtgtcggcggtgccatcctgatcggtgccctgggcttggtcttctggagaatccacaagaagcgcaatgagcgctacggcgatgaggacgatctgatgggtggcaccgctgtgggctccggtccccgcgaaaaggcccccagcccagccggcaacacccccttcaagaacacactagaccagtaccacaaccctggtcccgtcaacgcggcgtctaacttctaggtctgcgttgactcgacacttgtcgaagtgtaaatcttgtacgatcttcatgcttttctcaggcgctatggacagggtatgcgagttcacggttgcgttcttcggttgccaaattgcttctcttttttttttttgggcgtttgacaccccactccattcattctagattgaatatctgcgcatttttgagcgtttttgtttcggcaaccaccacattccttttctcgcgatcgcgactctcgatccctgcgtgactgacaaaaatgcggcactacttttccgttctgcctgttgttctattttttgattccccgtatctaagcaattagtttcgtcctatgacgaacctccattgtgccttgaccaatattttatccatttaccttttgcagcatcggacgtcacaagttgtatagtgttgatagacgtgtgctgcaaaggtcccttctatcttgatctgtatgtatgtaattcaaggcaaatgaaaccaaccagtgaacccattcaaagtattatatgtcaactagtccataggcatcgatcaatccatgccgattaacatccgcgttgttccggaatgcgagatgttctcagattatactctagagagagttattcagttgttgatggtaaaagacaatgtaagaaacattaaggtcaacggacaagggtattgttgaagcagaagctctataaggcgagtacaatggttgcatgaggatcactgccagtttagagataatcagcatttgggttgccaaccctagcgactaaggaaggtttgaagcaaaaccagtgtggacttcctatttagtgtaagtttcgactatctacgctagatcagccgggtaaactatagagatagcacgatctatgtacggggtacatggtatctcatcttccccgcatctaatctaccatgaggcgttcaacgggtataaccgccaagagatatgcgcccgctgccaagaaatccgctacaaccgcaatatggccttgcgaaattattgttcaaccagccaagcaggcaaagtatagggaggagatcctaaaataaagaccccaaatcaagcaagaatctaaacaattataaatgatgtcattgaggcgcccagctgtggacttacggtcaccctgggcataagctgactcgaaggaagcgtataatgaagtccttcagctggtgtgggatacataagtttctcctccgtaatatcatactggactgatccccctataatagataagcagatccagctcatctttcaatatatcaaagaaacgattcagctcacccttgcactctttctattggttgcttccgcccttgcaaaggattgcaagctcccctctagccttgaaggttgtgacaagctctcgtgtcctgataaatgtctcggtaatcgctggacagtgggggacaatattgtcattggaatcagactatcgcatcccgatgttccctcgtccttcgaggaacctttgcattgctgtggatatcatattggatggattgtttgaaataggcaaactgtgttaagtgttattaactggttcattgtcgaatatctagtattcaaatcaaatcgtgaatcatgatgtatgggccccggccccttacactccggagtagaacgcgctaaattagcgcgactgtcccaacaaggactttatctctccatcagacctctacaacatacggagcaagaatttaccttgttcactctcgagtctcaatcaacaccatatacctacatagtagccctggaactaaaccccaatcttggaaaccacaagaaccaaccgacgcatccgacttccgcatccgacccacggatacgccagaaacccatcaccaaccccataaccatccaccatccacattatcacaatgttcgcaacacaatccccccaaacccccttccgccaatcccactacaccccaacccgctcctccccactccgcaagcacagcaccacccctccaccgtggaccatgtccccgacgcgcaacacccaaggcgcgtcgcaaaacaccgcaccaaacccattcagcaacccgccaccgaccttcaacatccaaaccgagccaatcgcccgacacacgcaaaaccaccaatccccaatcccagtgcacttcaacgcgtccgcctcagcctcaacaacaccaacctcagcaaacccattcctcatccacacccaaacacccacctcgccgtcctccccaacccgccagaaaccaaagtacgaagcacgctacgcttctacgattgcgaacccgcttcagggtgcggcgggtctggcgcgcgcgaaaacacggaagatgttccttaatcgcgtgcgccatgaacgtgacgatggacgctttgaggcgcgcggggagcagatgatgcgtatggagcatcttgctgatcggaggaggtgggaggagagtatggcgagagatggggatgctgttgttgggttcgaggaggaggtggatgaggatgatatgcttcccggtatgttttttcccctggtttcattaggtttgatttgtggatatatgtatgcattgaagatagggtggacatgatgaacggcatctgctaacgttctggttttggtagatgatgctgatgcccttgatgagtttatatctcaggaggaggctatggagatggctctttgggagacgcagaggggtgttcctgggagggttgaggagttacagtctaatgggaccggtgttccatttagtgatgatgagtatgatgatatctttatggcattgtcggagcctcaagggggtcagtctcagtctcaggatatggatatgtcgtgagcgggctagagctaagggttaagtgttgattttcttttgcgaggcattgcattgggtggcgttttcggtccatttgggcgagatccgggtatgtacataaactaaacaagggtatatcgacgtgggttgcgcatgagacggacgatgtatgagtgatgggaaaaaagcaaaccttggcatcaaggcgatatcttcctttcaagcttcgatcatacattttcaagatcatatcactgctgtgggcaatcaggcactccgccagctccacccatcgcacctcccaagtcctccatgaggggattcgaaactagttcatcaggcgggcttcccgccgcttgcatctggagacatagtcagtaaatgaaagaaccaagatatctcgattcaaatatagtaaactcacctcttgcattttctcccacacatactctcgacacttgggatcatcatccgagaaccccttctcctcaaacttccccacaatctgcttgacaacccgcgcctgcgtctcaaaccgctccatatcctcagccgaaaccttgccactgtttttattcttctcaatccacggcccgaacttgacgtccaattccttcatcggctcatacagcatctccttgttggacagctgctccatcatacccaggaacattttcgacaggtctccgtcttcgccagcacccgatgcccccgcctcaaccgccttaagcagctgtgctagcatatcatctgaaatatcgtcttcattacttaccgcggcggtagctttatcaccactttccttcatgcggcccattgtgcgcttgatagcgtcgttgaacgagtcggcggcttgctctgcgcctacgcctgtgcctgcagttgccgtaccagaggagctctgagtgccaggagcagcgatgccagccgcggctgcagctgccgcaaaagtctctgccgaagctccagctccagaaccgccctcctcggccatcacgtcggcgaggagctgcttgaggaaatcacctggcgggatcccgctctcttcgagctgtttagcaaatacatcagcgccttggtcgacagttgcttggaagttgggatctaagctgctcccggcggccgcgcctggtcccatcatgctcgccatctcttgttcgagttgcttgaggaaggcatcttcgtcgaagtctgtgggtgagggatccgagttggtgatggcagagggtgcgggtgggtttgcaggaggggcgggtttgggtttgttgaagtcatcgaggacgtctgtaggtatgagtatctgttcaccctggagcggtgcgggggagcgggggcggggtgaagaagagaggcgggtatgtgttaccatctagctcatcgaattccgagtcttcgtcgtcatctgcagccgctttctgcgattgtgctagtactggtgcgggttcagatgcaggtgcaggtgctggtgcgacgttggtttgtggcgcgggctgagattcctgtgtggttgcggtgggagcctcttcggggcggtcctcggtgggcaaggaggtagccatattgcgcaagaagaataacctaagcaagtatgatctcaattgaaaatatggcccggtcggagttaagcttaactttgaggtaaaaagaaagtctggagatgaggttgacatgtgacgggtgtttggcggggtgccgatcgccgaggtttctatgtattttgccagtcctacataggcaatgttgtgtactactatagtatagtcaactatatgatttagaagtgaggatattgatttactttcaaagtcaaagtcaccgttctctatattgctataaggcagatctaatcgagatcgccaaactctgtccatgtacaaagtaccggcatatagaataagatctagttcactactgcatacctagttagcatctccaaattgtacgtaaacaaccttctccgcatcttcccatgagatcatccagaatatccagtccttggcataccaccccccgcataatttcaaccaggttgttccatgcgagaaaaatctgcaaggcattccaagtccggggaaggtgcgtcatcccacgatgatcgcccattggtccccgagggaaaccagtcgggcgcctgattcgcttccaggtgccccaatgggtcagggtcgtaagatcatgtggcttctggatagggcggaagacaccgaagctcccatagcggttataaatgggatgatctggtatgccggtatcggctatacgggtttgcgcatgacatgcattcaaggttctggggcaatgttctcaatcattctcaatgtgttgcaacttgcaggcagtttgcaagtacaagctgcaaatgcaatatacaatattgaatatactcgtctttttaattactccgtacagcataccgtggaactgaaacacccccccaccacacaaccttggtggatcatacatccgagaataaggccattcaactaaacgtggaaccacccaaaaaaagccttttcttcccaatccagttagaaggtggaaaaaaagaagaaaaaggaaggcgagaagaaaagaaaaagaaaaaaacgaaaaagtcaaagagtccaacctgggcaggtacgcgagagcccctcctgaccggacagaatttttctttcttttagtcaattgttttacacaggtattttttgtttcctcttttatctcaattcctctgactctttctttctcataattcggttttctttatgtcacaacttgaactccctctatctcgcacgtcccttctgagttagccgcgcgtgtgtgtctctctctttccccttttatcctttttatcctttttctttttttcttttttctttttcttttttctctcttttttgccggccagcaggtccggcaacgcggggaaaactggctgtgtctgttccgtgtgcggagggccgcctacaggcttgaattagattatataatggtctcgatggttgaccatagtgatatggtcatggactcaatcgcgcctaaacatgaacccggtcctgatggctccatcagttccgccgtctcaacaccagatccggaagccgaacccttgacccaggatgccgcgcagactcagaagaggaagggaggcaggaaacctgtacgtaacatcttcaacctggggggccccgcattcctcctttgtgtcacagtcttatctcctttgcattgtatactaaccccccttcagatatatgccacctccgaagagcgaaagcagcgcaacagacaggcccaggcggccttccgagaacgcaggacggagtatatccgtcagctagagaccaccatcaagcgcaatgaggaatctctgcagagtctgcagcagagccatcgcagcgccgccgatgaatgtctaatgctgcggtataagaactccctgctggagcgcatcctccttgagaaaggtaccccttaccctgaacctccggtccaaacttcaactaactcccaacccctttatccaggcatcgatgtacaagccgaactacgtctgaaaacaggggcgccgggcgcccctctcaaggcaaaccctatgcccccaaaggcacctaatgtggcagggggccgcccgaaccagcgacaccctgcaggtatcgcctcgaagcccgaggcgttcggcatgtcacagcgggaaggcgcatacgggatcccgtcaccgcagttccaagcaacaccgacctcccacgtttcatcgccctcgcacgccaagtcccccggtttcggcttccagggcgccatgtcacctgtcgaggccggacggccccagcttctcccccaaccccggtctttcggtcagagttcgccgccggcaatcagtatgccgcacaacgaaccgtcagaccccaaggctcaatcccgtgggggagctatggggccccgcggtgcgcgggtcgcagcggctgcttactatccttctccattccagaaacactacgatcagctcggtaagcctctctttgactttgttacttagttcttccccggctgacctttcaagcagagcaagagtacgatgcccaggccgatatggtcgacgatgaccacgatggctcagcatcttatgtccctgggtacaccccgcagtccgtcgcctcgggctcccacatgtccggtttcaaccaaccaccaggcgagggcacacccagcgatttcggcaatgcaaaccagctcctcggccagtacgagccgatgatggacacagatccgtttgggttaagcgctagcatgcacttccccacaccgttcaattacgagcacaacaactcgagacaataaactaaatttgtctacatccttctctcttattctcttgttctatattcatatatccgtccatcttatgtggcaaatgaccatctcttccctaaaagtttgatttgagcattctccggcgttgtgagggttttgataccaatgttctcccctggtcttctcagaggtatattatgttacattttgtacatgaatcgaatctttccatcacggcagtcagcaaatgtaacttacattgcatatttccaatctactaaaccttcaacgctctaggatcaatgatactcgtatccctagtaagccccgcaacggtctttaaaatctctttacgtcgcaaactcgcctgcgttgcagtgaagctctatattcatcttccaggatatagaagatattatagttactactgatttatgatgtgccctgtgtctgctggaggactctttgcccgaggccaattggcttagcaccattctcatttttgtatcagatactacatacgctgcaaaaaatacgatgtgaaagtccctgagttaacccataaggcactttggatattctaatcatgctacttgtaggcgagctagagggaatatctagcttgctactatggagttaagtaaacagttatgtccgagttgtacatggttctttactcgatggctcaatctatcaaacgtcatgacatcgctttctgtatagctttcatcatattccattgcattcttcaagcaagttgtatacatttgtactagggaatccctaattcccctggctttcaccttctacattttaagtttcgtcaacctcattcccgatcctttacactctctcgtatatcatgacattcatttgtactatgcacgtcttcgtacctaaggacaccgacttcactggcagagcagttgtcaacgagcccatagccgccgttcacacggtcacaggccttgcctgctccgacgaagctgccgctgccttggcagcgaaagaccttagagtactccgaggttctttccgagacctcgagatcatcaagcaaggagccagtgagacagatggtttaatcaaccttgcattcgatcacgacttcagcaagtatgcgtagagctgccttgatgagaaagagaccatcgaaactataagctcggtcctgataggaaccaacaatcctctcatcaccacctctagcaccttggggctcaagctattgctgaagctattggtcaaagtacaaggtctccctgctatatcaaaacctcttgacgaagcgggaagtcttaacagcttcatgtcttttgttatgaacattgataactcgacttcatgcagaaagacccaggaactccttcgctggagccacttgccggaagcttttggatggtatcaacgccgggtttatgcacagaattgaggagttgtctttcgcaacttttggggttgggcatatatcaggaccgaaatgcatacccaaggggagaaacaaggaccaatgcgattgccagccaaatgatgcagcaatccccacccccacatgtcaacttaaatccaaacttatccatcctacctgtgctatggatagctcggtgattacatagcttcgcaaggctgggagtacgcaggtgttgtccacaagtcagatcgacatactccaccgggacatgtccgctctgtggaagctaatcaatgcattaccatttgatatacacacatagtatcatatacagaaagggtgaatatagtacgtccaacaacgaataaacccaggtatactccccagagcagcccttgatgtaacgattacgtaaggtaccctaagccctagactgcgggcagccaatcagcaaccgcgggcatattcgcttaggaacagaagccgcctttcctgattagtcaccttacaccctgcaaccacaaaccgaggacctctcttcaccctgctcattcatcatcatcaatcttgacaggccggattcccttgggttctgccttgtgccccgttaactcctctagaccgattgtctaaagttgagcgcctccctccggaaggtctccgaaacacaacaggcgtcatggcggacgtccggtccaaggtacgctgaattggagctttcctgcgcgctgctagtgatgcaatgctatatgaatcgcgatctggaagcgatttgcggggttcaacggatttttttttatgttcattaactaattcgaattgtttcttctaatatagaacctctacgagcttctgggtaaatttcccctcccttgaatacaattctcggctatcttttccgacgacaatgagcttttttcctattccgaacaatccagctctattcgcatccgttcttcggccgactgatcgctaactttgcctatcaccaggtaacgacccagagctcgaccccagcagacccgctcctccccccaccaaggctatcgaccgccccgttgaccgatccggaaagcgtgatgcccccaaggagcaacctgctcgtcacaatgaggccaacgctcgccgtggtggccgtgtgaccgctggcaacgaggccggtatgtggttataagaatcgggttgacggaataattggactaataaatggacagcttaccgtgaccgcaacgctggccgtaaccacaaccgtgagaagcccactgacgaggctgctgctcagcccgcccgccgtggtggccgtagcggccgcggtgaccgccagtcccgcactggccagacgtaagcgatccctcgaatgaacgaatcaacccgaaaggaaaatcatgagaaccatgagatttcgtgaggaattatacaagagtgaccaaactaacccgaattatacagcgacacccgcaagcaggtccagcagggctggggtgccgatagcggcgagaagaccttggacgatgagcgccaaggcgagaagatcgctaagaaggaggagaacgagccccagacccccgttgaggccgaggagcaggaggagcccgacaactccaagtctttcgccgactaccttgccgagaaggcccagcgcgagaccctcgccgccaagcccgagcgcaccgccaacgagggcaccaagctcgacaagaagtgggctaacgccaaggagctcgccaaggaggaggaaccctcctacatccagccctcccaggagaaggccaagcgcgagaagcagcgcaaggagaagaacttccttgacgttgacctccgctacgtcgagcctccccgcagcggccccgctccccgcggccgtggcgaccgtgccccccgtggtgaccgccctgcccgtggtggtgagcgcagcgagcgtggccgtggtggcccccgtggcggcgaccgtgccccccgcggtgaccgccctgcccgtggcggtgctgctccccgtggcaacgcccgtggccctgccggccctaccgtcgacgagaagaacttccccagcctcggcggcaactaaattgcctgaccttgtcgggaactcgtgctcccaggcacggatattctttatcttcccgactctttcatcccttttctccatctgctaggtgtgcaagttcacccggaggtggtatttattgtgtcgcttcatctgtgatggtttctattttctctttcatggggattgggcttgaggggagtttgtgggatgtgagggattatccgtgctctgtggatgcaaaaactgcccagatttaagttttttcttttctcttgggaaaagacatattccgggttggtcttatatgtgttgtgtgtgtgtgtttacatttgccttcggtgagcaaacgcgaattggatgactgaattcgacgggcccatgtaatttgaatcgatccagaagaagtcaaccaaaaaaataggaacgcaaaatcttcaattgaattacgggacatgtctgcttcttatactttcaaagaattactatctcatagatctaccggtggggttgtacatccaacaggcaggtatacgcttttcgatgtatcgacgggcttgcataggaatagaccaaaatcggggttttatataaccttggatttacccaaggcgcagaagacttaaccctatctaggtatgtactaatgataagatagccaaagttgcaaaattcgggcccagaaacgagagacaaccgatttactgtgtcaacagcctctccatccacgacccctcgctgtgacgaaatgcaaacgtctacagctctccctcgccatggcggttctgccccgacatgtcgaattctttcgcggcagactcggcactctgggcccaaaccgccaaggtctcctcgtcgacttcgtcgaggaaagacaggccaggcatggcctttccaccacaggcacgttccaacgctaggaaagcaaagtggccaccaatgacaggccgagcaaagaagttcggaccagggaagcccccgtcaccctccgtgttgtgcaagtccgtcaatggacgatccgtggtggtctcattgacccagcgggcgacagaatcgaggatctctgtacgcacagccttagaggcgacagccattgagaagaattcccagtctgtcttggtgtacatgtggcggctgtcgaggggcaggccgtacttctgacgcacgtagtggtaccacacagactgcttctggtagatatgacgaggaacaaacccaggcgaatcggtatcggtaccctctagatggaagcagagctgggcatcggcgtagaggttgtagatcgtggtccaagagccataccagtcgtaggcaagcttggcatgggaaccatctcgggacatgccaaacttttcccatttagtgatgtagtcacgggcgactttctgcgggtgtagttagtcaatctgtcaatgcacagataaaagacggctcgtaccttgaaatgggcagcgtcagcatcgtgaccagctacctcggcgatcttgctcatggcgttgatgcccacaattcccttgagagccaaattggtctgcagagccagccaacctgcaaagtcatcggttgagactgttctcaaaattagcttgcatgaacatactatcagaaaagacagagaaattgttcttacgctggttagcaggctcaagagagaactctaccagatatccggtccactgtttccaaaggctatagcttcgcttcacccatttctcagcttggtgctggcccttactaccgccaccccatttgctatcttggtgagcaatcccagacagtacctgtagattgccaagagggaagagtccagaagtctcgccttcagagcttgacgagggcaatccctgtgttgaccaaatggacgaggccgcggtagggtcttcatagcggagcgagttcacaatagccaaacccataatgaggatgttaccacactcttcgaccggcatgtactcgtccttcccgtcaggatgtccggtagcattggggaagtgtgtacccaaatcgtgcatcgcatacttattggggtattggccgctcagcatgtgctcgataagcggctccaaaaggtacgccagccatcgggggttcgtgtacaggaaaaaggggaacgcggggaagatgacatcgatggtttggaagttgccatttgaagagatctcctttaggaacaggatcgggtcgtccggagttcctgaaaatgtagttgcgcccatgacctgccgcgcactaagggcaacgatgtcaacatagtcatcagctcccgacaagtacgcgtcatctgccacttgctgcgagtaattggatgctagagaactagctgcagcgtagtccctgtagtggaaatccaggagctcctccgttgttgggtaccaagattcccacaagggtcgcatcatagtgagcccgcgagatgatgcatactgaacaacggggatttggataaaagcgagagtaaatgtgacgctgtcgttgtagattttagatgaatggcctaggtggaaagacttggagaacgcaaaaaccggcgctcggtcctgaatagcacggaatttatcatcgttggtgtttcgcagagttccagagctagcaaagacacggcgcacgtcaatcgcatctccagattggaatttagcactctgtattgtgattagctatagatcagttcattttgacaagatcggacttacagatggtccagtgaaatgaagagtgccccattccgcacggtcgcgaatctctgtgagaagaagctcgttctccctctgtacttgccattgattaagtgtaaggtcctcgtactcggttttcaagctatcccattcccatttgatcttgctaccagtatctccgctaacccagcggccgtcaacatccatatagatgctgacgtcgacatcaccttgcacatcgattgtgacataggaagccgggattgactgacgtaaagtcgaagttggagtaataggtgaaaggaatgagatagtaacgtctagagggtttccggtaccagtgtcaatgtggtaggttaggttggtcgttgaggcatcgtagttcaggccgaggtaattgggaaacttggtcttgtagctgtaatttgttagttcctaaacctttcatatatgagtaattttcgaattcataccctgatttattatccaaagactcatggggcttgcccagaagagggtagacggtattctggcttggaacgtgggccatcaacgaaagtcccacctcctccccagtatagaacataggccattttaaccaaggtgcatcccgagcatttgcgagccaagtactcagatatggatttcgtacgatcagggggatcacaggcggagtgagcgtagatgcggtgctaaccgatgcctggaagacagcggccaggaccacgagcgacagctgcatggtcacactctgggcgaaggtgacacagaattcggtccacgatacaatttatataacaataatagttggggttgtgtaacgaatgtactgaaaaagttgtagtaatgttggagaagaagaaaggttcaagggaggaagccgaatgcgggggaaggatcaaggatcaacataagtcattcctcggcttttgggaatagtgagatgggcttgaattgctctggtaattacggcttttcttttgtttaatcctatatcttctatacaatgcaattcaagtcagccctgaagagttctccttttcatcccccgatgatgtcatgcggagacagtactatctaatcacagagagaaacatgcatactatgcctattccggataatatatgtacagtatagtataggttcattgaattgtaaaacatgggcagagatcagtcaagagtagtagtggtaggtttgaaaaaaaaaacgatgttatccgcgatctatactggaatgaaggactgaaaccaccaacatccaccctcatgagtactgtgtcctattctgtctgcatattcattaaggacatgggaaatggtttgattgggaaagcaagttcaggtcattgccatatctcaggtgttgttaatattgtctgtcttgcatggttatatagttgctataaatagttattcctattagaaacgacattgggtcagttgtaggtgtcttatgttatgtatagccgacaggctatggagaggtttctattaggcagaatggaattcctaagagtctaatactatgtaaacttatcgaacaagcaagaagcaccatagggcagcatcgggtactccgtatatcgttgagacgtgacaatatgtagactaataaaccaagattacctacgacatccctgtaacttacgggtggtagcatatagaaaaggaacaaaatgaggctagtcatgcacctagatgcatggattctataatattgttggtcacaaaggcattgttcctcatgatatacctctgccatgggctattctctttcttcaagatgattatactactacatagatattgtccatcctgatccccgcaatcttgttcttaagcgaaagtatttcaaataatatcaccttttctgtttttctcttataatttaatcttagaccgcgtccgtggggtctctaacccttgtggatccaggacacgaaaagcactagacgcgcccaggctaggattgagaaattgatgtgtgacagtattataacccttaagaaagagtcctagaaaagtgaagtggaacaattgagacctgaaagacgtggaatcttcaatatcaaaaggttttataggggagcatcgagaaggaaggtcaattttatacgcgtttataggacaccagtctaaaacattctaaaccaagccattccacagtattaacagtatcaaaacacaattgcaatgtccaaatcgaaatgcaaacgcgttctcagacacgcctgtgtggagccccagtccgtgctctatacaaggctagtaagttatcgacctaaacgcgatcgacgcgaggaccgtttttcttttcccagttcgactttctacctacttcctactttctacttgctttctatatcttagcttcccacttaccaattgtgataaccctggaagttgcagttctctttacatatcgtattggttcgcgtcagacttccccgcagcacttccggattctaccatctcaaccttctattcccctcaatactccctcggactcacctgtgcactattcgaaagctatataatgaattcaacttcggtgcaattcagtcctctcaaggacggacgacaaattctcggcgagagagactcaaacgcgtgtctgccccccgccacacacgccaaaccgtcattcccgaccattgggaccccggtcaggcggatgccaattgctacctcacctaagaagctcctcccctctcctatatttgcaggccaaaaacggacacgggatcaagtggatgacaggggagaacttctcggacacgtgcaggcgcgggaatcctctccgcagctcggcgtccaatccaccgtaaaagatgatatgcaaagccaggtaagcccatgcgagacagacaaagaagtcccgggaatgaccagtccaaagctaacactgtaacgcgcgaatgatagctcatccaaaccccgacaccacaaaactcacaatctgaatgcggccaaacacaagatctaatggacatcgatcgatctttcaatgtgcctagcacccccgagcaagacatgcatagcgttaccttagactccgacgcgcgcaaaaagttcatccaacaagtatgcgagccatgatctcagtatcaaacaccttccccagcgggcagtttctaacaattgaacagaaagcaagccttctccgatcaagactacagagcgcgatgcgcaatgtgacagaccaccaatttgaccgccgggtctctgagctagaagcacacagtcgtaaatgcccacggctctcactctccgtcctcgccacgccacccctctcatcgcgcaaacaattcacatctttctcatcctcgcaaataaagacaccccgcatcggctgcgctggcttcatctccaccccctcccacagcacacccgatcttccaggccgaccttcgccattgtcttccagcgttgttcagcaacgcgcaaagtcacatgcccaacgaacaccgcctcgtgcgctcggctccccagtgcagctgagtagtcctccagctacggtcattcgccgtgaagccgatagggaaacaagcatgggcccaagagccgagcttatggatgatgtggatgctatgtcgccgtcacagcgaggcgacgcggtcgatgggctattgaaactcatgagtacgacaggcaatcaaagctcggatgcctggactggatgattcgaccgcgttttctttttttttgtgttttgtctatgctgtctgggctattgcttaccgtgtggagcatgcccgagtggattcagtcgcattacagtggataggagccattgccagagcaatgaattgcatgatgtatagggccatgacaaacatatcgaggtttgttgatatacaagtattggtccgaacatgacggggtaatcccattttggaagcatgcagcattattagaataattcgtctatatgttgcgatcaatgataccatttttgcatttgaacagtgattagttctcgtcctaattctagtatacagatttgaaaccaatagcagtgccacttcctaggcagtacataagactcatattatcaagtcattgaatgttacactacaagtcccaatccagaaaaagatcgctaaatatatcaattgattcaaggccgacagcatctatctaataacacgcccctcagcgaaccttcttcaacttattacgcttccgtccaaggatatcgcgaccctcatcaatctcacccgcagcctcacgcttcgcagcgccaacatccttgagcagactggttctaacaacacgactctcaatattgacaccttcctgcgcgaactcctccatctgcctaccaactcgctcctcaatggcaagaacgagctcgacatcacgctgtccaacaagcgtggtagcctcaccattccgtcccgcacgcgcagtacgaccaacacggtgtacatagtcatccggattccggggcacatcgaaattgataaccagctctacggacgggatatcaagaccacgcgatgcaacgtccgtagcaaccaagacacgggcagcggtggctcggaaacgagccaggttagctgtgcgctcggattgcgggaggatactgtgaagggatgtgatgcggtggccgaggcggcgaagagtgcgttctagcagatcgcatgtcttggtatggttgcagaagacgatgactggcttagtgacgtttatttcggtggaaagcagcgcgtgcaggaaggcctcgcggtgtgtcatgggaaccttcaggtatgtctgcttcagggttggcggaatcttgccttgattttcggtgccgatctcggtcatgaagatcggtggcttattgcctgcggccggcatagatttcagtgcccgcacttcggcggtcatggtcgccgtgaatagcagtgtttgacgttcggccgatggtggaagggctccgagacatgtttccacgtctggtagcatgcttcccggcccactggctagcaggcgatcggcttcatcgagaactaccattttgacgcggcggagaccggccactgtgtcgtctccggacgtcttgatgtgatcggcgagtcggccgggtgttgcgatgaccacgtgcggccggttcgcaagttcaatagcctgcttccgcatatccatgcctccaacgacgaggataggcttcatattttgcggcgcggaaacggccctgaactgttcatagatctggagtgcaagctcactagacggagaaaatagagtcagttaccgaggatgaaataaagacgaaagatagaacctctcatatccactaggacattgaaacataccgagttggggtcaaaactaaagcgtagatcccgaaaggattccgcgcccattgctgcataatcggaactgcaaaggccatggtctttccggaaccagtgcgacttccaccaatacagtctttccctttcaagatctcaggaatgcaagccttctgaatagcagttggccttttgatcgccattgtcgccaacgaagagacaagccaaggtgcgacatctaattccgaaaaagtggacagcccgctctgtttaccaagctcaattgcatcgctaataagaaccggatcatcttccttcgattcaggctcctcctctacctcgcccttcttcttgatacgagagagggtggggagcggcgcaggcgcgacgtatgagtcgttggaagactctgagagacggcggcgcttgggggctcggtcgtcgacatcgggttgttcaacatcagagttatcagacacatcggagtcctcgaactcggggttctctgtgatcgggggcgccatcttctttgcgactgtctatcaggacgaaataattttgtggcagaaaaagttatctctaataagcggtgggaggttgcgggcctggtttataaggcactgtatatgcatcaaatgaccttggagaaaatcccatcgtatttagttaaataagtagggtttcaattaatacttaatagacatcaattggttttgagtctgtggaacaaccgatctatttgtttagtcgctgccggagaaactagacatcaatcaatattccaaattgttcatcgaatggtgtataatagtggtgagaacgaaaacataaccaaacataattcgagaaactttttattgccacataggctatagtagcaccatttagtccgcccgactagctgtgcttctgcgcgaaacccgggaggcgagctcatacgcctcacctcgctctagctcatcctcttcgactgcagacgccggagaagctgaagttcggtttcgtaggactccgtcatctccactcgaatattcctcctgggcaccactagctattgcttcatcgtagtcctccagtccgtgggtgccaccgacactttccatggtgaatggactagctgtcggcccatcgagtgctgcaagctcctggcgggagaaccatttaggaagcaggaatgagcgcgccgggattaggaggagaataataacagggaacccgatggcagcgatggtctgagtgatagcgaaagtcgcaccaaagccaaacaattcaagagcgacgaaggcccagatggcgaaacggcgctcgattcgcttcagaggattcgacgcagaggtaaacttcttgtcctcagcgaggaaaatcagtttttgcgtaatgccattgccttgtagagcctggacacccataacaaagaacagaccagccatgacaccctgtggaatcaagtggagcacgatgaggaggggtccagtcattgttccgagggtcaaaaggccctgtgcgaagttgctaacacgctgctctactacgtggtctgtaatccggatagctttccccttatttgtatcatcttcgtctgcgacctggcgagtgacgcagagggcggcagtgtggaagggggcctggggaatcagaccattggggaatggtactcccagaagtccagctacaaaggttgtgaggccgaggagccagaggtcccagtggaagccagctggctttcgaagaggaaattcggttccttgggcaatgagagatgacactggaagagacgtgtcagccatacaaatctactgtaacttgatcgatgtagaatactcaccattatgatcaaaataaaagagaattgtaagaagaagcgcaaatgggatggcaaggaaaatatccccaacactgatatcccagaaccgcacaagccaagaccggtcacttgtaggaaagaaagctttgctagtagggagcgtagcgacatcaacatctctcattttaccgatgtagacgaaaccggtaaaaaagatgatggtcaaaggtgtaccatagtcctcaagaaatttccgaatgaatcgcttgaaaagatggccgttgcccagctctccacagatccatgcacacattaggacaagtagtgcaaccatgatactcagataagcagaggtctctccaacagagccccattgtctagtgagaacttgaatgcccttctgaatatagatgcaagcaacgtagaatccaaagatgtcgcacgagaaccgagtgacataggtcagggcgttgcaggcattagtgatggccagtatccaatgcataatcaaagaccagctattatggatgtcagcaaagtcaatgatcgaagatgacaaaggaaactcacattccaatccaacacataaatgcaagatacggtgtccctcgaggagccatgatatcatagacagtatagttgaacacagtgatgggacctacaatcctcagttcaactttccatgtccatatattccaggtttcttaccagtgactccgacaatgaccaacggttgggccgcaaaaagcgaaaatacaaatgcaccaagaacggaagcaagtaggacttcattaacgccatagctttgacttgtcttctcgaacatatccaacgagaaggccaaagcaggcaagatactacactgattgttagcaaatgaaacagtgcgccggagaagaagaggttgatttaaccaatcagagcaagcatacttagcaaaatacatatagaccgtagcaggcacgacacgataatcccatgcatcagtccaatcgctccaataatatggtgctctgcgcttgacgtcgttgaccattccacggaacaaatggacgtgccaccatcgttcctgggctgagtgcaaccccgttgtcgacgcaccgcgatgcgagttttcttgcgggccgtcttgtcggtcaagagactggtcagactggtgtgcggtaccatgatcagctctgcctgagccctttgagcgcaccgatgatagctgttgcgactgccaagaagatttccgctgagcggacgtggagtgcatgttgggtcccgggagggacaaatccccgtgtgacgatccttgcatatgcaattgtgggataaatccgattattctttagtgtaatacaactggtatgaatttataaagtgccagtgacttgtattgtacggaaagacatatcatataggaggacatgaagcaggacataattgaagggagcttgattttgcggagaaatgttggggctgacctataagtggggcctgaggcatctacttcgagttaggatctgcctagctggtcaaaccgctactttcatttacgagtgtacaggacaaatacgataatccaacattgaattcaaggcgaactagaaagaattagtcggttactcaaaattgtatagaaaaggacaagtatggcgtttttggaacaatcgttagcgagccgtgggcttctgaaataaatcctcgttggattgtctttcaaagcctccatagccaatttcttcgcgcatgaacaaactatttgaaacgagatcttttttcttcgctgggaaggcgaggtcatcactgtgggggtgggggtgggggaggcaggtcgcttggaggtggtggaggcggagcatcgccaggcgggggcggaggaggaggactgccagcacctccggggtacattggagccataccaggagggggaggaggtgcgcccataccagggggggcagcaccaggagctcccatgccaggaggataagccgcatatccgtatccaccataaccaccaccataggcaggctgctgtccgccaggaggggccggttgctgccaaggagcagcacccggagcaacaccaggagcagcataaccaccttgagatccgtaagcgtagtcgcgggtttggggtggaccttggggttgggcctgcgcagcccaaggggcaggaccaccctggttgcgagatccatagtcgtcacgaggtccgtgattgtcgcgggatccatagttatcgcgggatccgtagtcgtcacgagggcgagggtctcggcgctgttgccatggagccacatcgctttggggcggcggtccacgctgctgccagggcttcacatcacggtcgtcgggacggccattgccaccgtcgggaccggcttcaatgcgacggggctcgtattcgccaggagcaccaccagacaattcattcatcagttgctaaggggttgttagtaccatgcccgagaaagcagtcatgagcaaagagaacttacctccatctcgcgatccacggcatcaccagtgccaacagcacgatcgccacgtgggccgccggcgttacgccagtcactgcctctctggcggtcgggacaatcacgagccatatggccagcattgccacagacacgacagatgatattcgcagtgaagttacgctgctcggggcagtcatacttacggtgtccaatttgaccacctgataagaaccacggttagaattaatcgcgcaacaaaggacgtttgaaaggtgttcacttacagttctggcaagcctggttctcgtcgtcacgaagggtaccgttaagagcagccagctcacgaagttggttgcgcttgagctcgttctggccttcagggatggatgcggcctagcaactgttaataccgggttttgatcaacaaaatgagatatgggaacttactgtttcaatgacattgtggacaagcttcttggccttgttaaccttttcttcggtgtccgccataatcagacagtgcaggtcttcttcctggttgctaccgtgagcggcgtcagaccgaccctttccttctttgacggagcctttgcctcgaatggcaatcttggcaccggactcggtctccatctttttcaaggtgtttccacgaggtcctatgagtaagccaactgtaaaaatagcaagagctaggtgttagtgatcctgtaatttttttaaatatgtgcagcatcaagcaccacggtttagcaagaaacaagctgaggacatccaaagtggtatgccttgtcagctcgagtcgagtagggactcgtgatagacgcaatggaagaatggttaggagttagagggttagttatcatactgaagttaatctctggatagtcattcacggggacgtagaccttctcctgggtcttggtggggcgtctgtagtcagaaggcgggttgtagttagggatggtcttgatggccttctcgaccagtttatgacgttcgtcctcaagacgcttgcgataacggtactcgcgagtgttcacacgtcttccgaagttgtcgtactggggaggtggcgagggagatctgcgatcaaagtcagtatacaaataaacggagtttacaaaggatgaaagcacgtacctgtcaccatcggcggggaccacgtcgttgattcgaagcttctggctgatttcctcaatacgaaggtgaagcgtataagcttcaagctgctcgctggtgaagttcgccatgatcatagttggcaggcccataagaccggcagccttattctcttgttggtcaccccagcggttgcgcttcttgcgcctcttgccatcgccatcggtgttcaagggagctggatcggctttgaagcaaggtcagtcttgattttgttttcacctttgagtttagaagaaacgtacctcgaacagggctacgcccacgctttggaccatcgggacccatagacgaagaggggatagaagaaggggtcacagtgcgactttcctcctctccatcctcgccgcccatgcgtcgccggccaagcgggatgttgttggagccagttattccctggttgcgccaagccatgactgctgctttggatagaaaaatgtgagtagtaagtgatataggtggaagagatgaaagaagctgcggtgttcaagaggcgagcatgaacacgtgatttcagcaaaatcttatttcgtaggcggtggcgaggccatactcggatttgggtatccccggacccgatattatgatgttctccgcttcgtcttcatagatgtacagtcacggtctgtacaatttccggatttttacttcattcttctcttatttcctttcaaaggctccattggtccaacttttagttaggcctattcaaagggtagaccttagcctgatttaactaggaggcagagttagtagagccggtaactattgggaaggttcggatggagattatgaaaaccaacgctttttgatccagagcaagatgatctttaaaagggaaatgaggtttggggggagaataaaagtagcatgctgggatgagagttcgatgaaatataggctgaggattccactcctcggcattagcccagtacctatgcaggtagatggctttagcctctccggttttcaatccaaatctcccaattgcttcttctttttccattgcttcaggtcaaatgttaccgtagctcatcctgttgtccattccacatgaaagaagccccttcaatggtattgtggatgctattgtcattcaaaagctcaaccaagcaaggtgttggctggtacataggccgcgagtcaatgaagtcgcgtctgcaacagcatctcatatgccatgccatggactgaatggagtggctttccatcaagaagggcagggcagggcctcaaagcttgatcacagaacctatcactctagcatgacgcatgacggagggtcgatttgatgatttcaagactgacccgttaatgtcccgtagaagaaaaaaacattctttttggaagggatatctggaccagtcatccttagcagaattgtcggatactgtctggttctgccttaacgtgtctgccgagccattgcattcaaggaatttgcggagcatccgggggtgtatcgctcattgtgtgtgtatgcagatgctgacctcaacaggccaggactcgggagagcgagtcaaggaacgcggataacaacactgtgtattccgctcgtggtgtagtgatatggagagggaaagagctacccgtaggtatctcctctcagtgccatccgactccaaggttccttcccaggttggaagtctagagagattacgtcagcagtagattttgaggaccctgcgatctggactctacacgacgatgaggcctttcggatctatgcttgtaggtttgcgattttttcgatactcagtgggcatgcacagtcttactcggttataaaaaaaaaactgcgaggggcgagcactgaaatggaaagggaaagccctgggatatggcctacaatctggggtatacgtgcccatgtaaagtgttccataacactcatacacaatcagaaaaaaaatttagtttatgatctcttgattggaatttcggtttgaaatcatctgcgcagctatccaagtcatcaatctcccagcagttcttctttaaactttgcctttagcctgggcctgcatcccctgttgaatccaagacctggcttcagcagccgttttatccacagctgccttattctgaattagatctttaatggtatgaggagaagggacatgacgaccactctcagtacctggatgcgaagccataagcttctcccaagccttaacattcgggaattcgtcaatatcgatatcagcccatcccgcagcagctatccatccccagtgtgagatatcggcaatagagacatggtcaccgacaagccaaccagactgacacgtagcaagatgtttgtctaaaacaccatacaatcggcgacattcgttgacataacggttcacgccgtactcaatgcgctcaggcgcataccgtgtgaagtggttggcttggccttgcataggtcctaggcccgcattctggaagaacagccagttcttcatagcgtagtattcccgcgtgcccctggggaatgagatcttgttgtcgtgatcgtactgctctgccagatattctagaatgctaccagactcaaatagccggatctcctttccatcgctaaagaggtctgtcaaggcagggatgcggccattggggttgattttgagaaaccagctttacggtagttagctttgtttgtgtgggtatttgtaaagacatactcttccttttgaacgttcctcgatatgtcaatcttctcgaccctatattgcaggctacactcttagtaccaagcgtcagaaggtcgaggaaactactgtacccaagcatctctagcgctatggatattttgattccattgggggtctgggttgtgtagagggtaatagttggttctggcatattgacaaagcaagaaatggaactgaagattaaacagatgattgagaaagacgaattcttaatagatggtttaagtatgtatacgatgaggtcacattagctttccccgggctaaccccccggggcccacttgtcggatttataagctcgtggaactcacggactccgggaatgttctcccatgtgaagaatcatatcacctaagcagatgcccgggacttcttggggaatagttccgttctattacccctagtcgcatacattgcggcgagtgcatcaaaatacatgccctgcacggattgaagacgtgcgtatccctcgagtgtggattgtggcctatgggaatggcggaaaagaagcagatatggtggatggttgtgcaagattgaaacagacgaaagacctgtgtacctagtcatgtactgcttagtgtctagttaggtctgactgtactattgttatggctatgtagtgaacgagaggcagggctgttcatcaggcaggtcgctacaagttaaaggcttgtttgtggagaacgacgaagtcggcggttattccctggactgctgtttgaatcattgggcctcgatgcttaagttgagaagaatttctaatcaaaccgtgcattcgcaggaaagatatgtacaactctataagcccatgacgacaggaagatcgctgccagaagagaacaaaacgatcaaagtatacaagaaaagccagctgcaaagcaaagcgaacaggcaacaggattagactgtcgtataatcctgcataaaaagatgacagggaccatcacaacaaatacgctcatacgccaaaaaaagacagccacatatgtctaccagtacgtcagtctaccaagagaaactctcttccacataatcaacactagactgagcctgcctctttcgacaaacacggcgaacgtcatcactcagaccgccattgccgcagacaagaacgcccatggcaccaatttgattctcgacctccataccgaccagtgtgtcaatattcggacggccagggaacatctgcacggttgcagaggggctctggatctccttggtgttgcgcggccgtgtaataaagagcataatgcgcaggacttcacggcggcgatccattgccaagatactggtcatccagggccggatccactccaagtgttcgggggactggataatccagacgagggtgacgcggcgggcggcgacggtgccattcgcgaacccggcgaccagatgacggacgaaggggacgtggtgggtgatgccgactccgccggcgaagagcatcaccgtaccgtatgagtccatggtgtgaatgttgccatatggaccctcggcgaaggcgcggagggtaatctgtgaggtcggggagtttgaagcgcgctggaagagcttgtcggtcattccggtccggcggcggacgaggagagagatggtttctttttggggcgcattgaggatgtctttgcttgtgagtgggagagacttctcgtcggaatgactgtctgccgtttcactccagccaacggagaacgggtgtgaggtccacaagcccactgctgggatgtagaggtagatgtgctgacccggacggaaggtccaggggcgggctaggcgcagggtaatgcgcattgcgtcgccgtgcaaagcctcgatggttgcggtggtggattcacgaccgcagttgcggtacacaatgattaagaagcgggtggctcgctcgagtgcccagaggatgagggcagcaagtagataggcttgcgctggcagcccgttgagatggacccagaggaaacccatggaaactgccgtaatggcaatgtgcaaatggaggaatgtctcatagaatgcatggcgaataggcgagggcgaatgcagcaagagcgcagtgaacgcgcaagcagccaccaagccagtcagcaaaaagctgctaccacccagagccattccgacaaccttccagcctttcgcttgggctttgggaatagcccatgcaaacacatgtgcaagactctccagcaccacgatgcggccgagccatcggtggagcagattccatgtatcaaaaggcacatggagcatagcaattagagggttgctacggcctgccatcaagatcaatgggatcaagttcaccgttgccatcacgccggtacggttacgaatgacaccagcaagcgtgtctgtttcggttccataaggagttgtcacacagcaaagcgtgacgttcatggcgataacgccggtgataaggaacgcatggaagcggctaggcaaagtacccatgttaatagctgacgagagctggagttcaaggttgtgtcggtttcggaacaatgcagcatagattatatgctccttgatccaggcaaaggtattgtgtgttgagacgaagtaccgttgccggtcatcgttaaagcttgccaggcgtcgaaggtggcgagagaagcagaagacgagctgccagatgtaataagcggcggcagcacagccaagggcaaggattgtatagcgtgccagactatcgttgatggcttcgtagtagacagagtaacccgatcgtttttcgatgtattcaatatccgtcgcactggtcagcccagcgagggacatcgccagcagaaaggagtgcatgatgacagaagatgcacgtcaagtgcttgggactgaacttgatgtgtggtttagcgaggccggctcgctagaaaagagtgtatgaaaagggaaacgttgatatctggatcgaccccacagaaggctcggaagatattgtcgagaggtaacagtaaacgaaataaccttaggttgcttggtcgaaccacagaagcaagggtcaaaggggtttccgttgggtggctggtgtaaagtaaaggacctgcctatatcttatgtatagaaatcagacggaaagcatggaataaagccgtttttcgatatgttgtcagtccaatcgagctcggtgggaagcgaagatgttcacagaacagcgggcgatgtttgttaaaggcttgttgtcgaagggcaacgacaggaatgctagtgatccagtcactgctaaaaaatgggctaaagatgaagaattgtccacagtgaaagaatgaggattgtctcaataacaaagacaaaataaatgagacaatattgattgtagttagaaaaagagaagaaaacgaacaatgaaagatcgaaaatagaagaaaggactgtttccccttgtgtttagtcctagtgaagagagagtaagacagtgccagggccaaccggaccaatatgtagaattccagcaagactctccacctccagcacggcccatatcaatgtggaattcggtcatttccattttggtttccgggattgttctcaaatttctcgaaggaggggggcttgacgctgggaccacaggtgagtgtaagggatttctcatgtgcgtactccgtatggaagatgctgcagatccaatgcagcaaatcaggggcccgtatttgcagataacctcagcagagcttggcaaaacatggacatagaacacgcgacaggtcaagcccgagttgtcgtaagtggcgggaataccgatcaagagctgtgactggccagcactgttcaatagtgaaacagccaagtggatgaagcagatccgtgttgatgcttggcgtctcctttagcgcccacgtcaacccacattaggggctgtgaaacaactccggtcattatttgctccagtcgtcactgtaaaaggttatctcccgtctccagggggtgttttcttggcggatttcatttatatcagacctgaatctcctctcacggagaattatcctccgagacactgtgcttggcctgcatctgatgaatatattcttgccattttccaggttgtcctttactccgtggtttggcgaattggaacgggatgatatgaataattcaaggccttgtgctagagtttcgtttccaatttgttttatcttaggtgccatataaagtgcgcatgtgaattgtctcaggttcatgtccaatcgtggggtctttccgttggcatccgttggcattcgttggcaccgttggcatcattggcattgttgggatcgtgaagtccaaagactagtccaaagttgagaaaaactaaaatcgattacagaggccatgaacaaacatccaaacatccaaacagcaaaaatccctaatccaacgccatgggtatcaaatcaaaagtactaaacaccgatttcctaaaacaaaagcggaccatccatatccaccgttcccaaataaaaatgagccaaggtctcgtaaacgattgatcaaaatcagccatagacagccaaaagatctctttacaatgtaaagtgggatacacatcccagattcatggatgaaccaggggactctggggggtatccgacactgctcgcgaaggtaatctcaactaaaattagccaagaaagccccgggtcaggccccgatcaaaaaaagctgagctcgtcgtcactgtcactatcctgaaaatatggattgaccttttgtcgaggtttcggcggctcaacgatgccgcccatggttgaaaccgaagggcgcgtagaccttcgcctctctactgtacgatggacctgcttcgcagcacgctccaaagggggccgagcaataggctgacgcgggctgcattctttgtgattgacgatcacgacttcaaccttccgtgcctgttgtgttgccggggtcatccgtctagccagattggtgctgcgctctcgcaggatgtcccggcgagtgactagttccacggtaggattgtatctagtcgagaaagtagagcgtacttgaggggtattttcacccttgtcaactacaaccactggagtgagtcgttgccgttttctaggccgtgttggtgaaacttcggtgtcctctaaagtccgcttggccgccatcggcaggggagatgaggtcaaacttgagacagagtcctggaagcgatcagacccaggtgagccgctgtttgtgtctgtagaagaagcgatacaggggaccgggcttgatagcatgcgcatgggcctttgcatcaggatgggctttcccttggtcgctggcgtagatgccacccactcccctatgctatcttcccagcgaaacagacccgtactctggctagatttctcgggttcttctaaagacctttgggcagtctcttcctggcgctgttttttcacggctgcctcctgaacgtcgatggcccagatgtggtcatcgggatctcctgtagcctctgcaaactccatggcagcttccgccgccactcgcccaagcaaagtggacaaagctggtgtatcagctaagcgaacgagttgcgaaatcatgtctcgtatttcgccgccagtatgttcggtttcatcttctgctttctttctgaggcagcggaacgcttggtgtacaaacaatgctaattctctaatcatgtcagaatgagatgctataacctccgcgtattcgtcaatgctagctgttgacaccatcgtatagtggttgtttaataaaatttcgtcgttgcactgtacaagactggtagccagcaagatgcagccacgccgtaataattgatgaggggtattatcaggccgctgcacgacagaaattgagtctagttctcgctgcagagcaatatgaagatagcgtgtaatgcagctcgccttcgttccatccgcacaatcagtgtcttcggaggcacgagaccttgaaatgtgcatgccgcagatcgctgccatgaggcttataacgtgattgctcagtgcatccttcacttgtaagggacaaggccgtgcaatatttgagatttcccacgctatggggacagccctggtcgtacgagcacgggcagtcattcccttctttcccttcacgagtaattttggtgtaggactctgagcaggggtgacagagcggacaccactagctgagagaatcacagcttcaatcagacgcgtagctgcaggacagtcttcatcctcttttgagagggatatcgttgctcgtgtcatccagctagtccacaacttggttcccatccactctggaggtagcactccccgcaagagaagcttcgcaagttcatcgaagatgtaagagcgattggcaacgccatgatgagcatacttgtgtaacaatcggaccggatccgaaaggtcatggccaaccactggccttacagcctgggggtatgggtaatttttgcgtgtggaaagcaatgtagagagcaaagagtcactttcttcgggcgcaaaggaacgacatttctcaatcagcgcgcatgcaatcgaatctgttatccaatgattctgtatcagggtagaaatcaagtagataccctgggcgcgaacagcctcgcgaagtggcttccagcctgtcccataaggcgcataaaatgcttccaattctgtaaaatatgcattacacatatcttcgtccccgtcttcgtccaactcgtcctgcgcctcttgctcgctcgcaataaattctggcaaacttcgtgccaccatgaacagcaaggatcgtgccccacgcctgtttgtttcggataagggcttcacttctcgcgtcgatatcacagtattgcaaaggaaattttggaagacgcgatcaagattgtgtgctatgctggcgaagcccggatcaccagactggtcaagaagttcttgccaagggctcttgtggagcgaatatcgatcacggaacacttgcggctgtggtagttggctattggggttggcatggccttccgggcgttttgacggtgcactcgagggcatctcccacctcctcccagtgatgagtggtgtcgcgacctcaatagcgccgggcagagtgcgtggggcttctgggctgtgtattgatagtctatcgcgctttttgcctgcagtatcttctgctttggacgaatacttgtgtctgggtcgacgtcgctcgggctttttccctggaatccaagctgggtcgttttcatccggatccgcatccgagcctgagcagttgtgccgactttctggtttgtggtcgggttccgaagtaggcaaatcattgctctctgctgtttcttgtagttttgactcggtcgcgatcatcgacaccgtttctttgtgctttgcgattcgacggcagatggaggtcaaggggcgcaggacacggtttgcccattttgcggtggcttgggcatcctccatttaggacaaaaggaataataataactgctactagcatacaaaagaatcagcactgtcacagggttcttctggtcattggggctgcactgtaccaacctccctactaacaaacccctcaatgatacatgataggaacaatgatggcactcaaccaggtattgccaataatgcagcaataagccaatgtaaataagatatgccgaagaataattacagggtgcgttgagtgaaaaatgaaggacaacattggatgagcaaacaaataaaacaaacgttgactaatacaacaaggcgggtaaacacacacatattgcctattatggcgatcttagtctccagatgtatacaatcatgttcctggaggtaaatatacatgcatctattccatttcaaacacttcatatcgacgtaattgattctactcagaaagagaaaatgacccaagtggcaaatccgcataatgcaccagatatgagcccattttaagacaaccgagtcctttccatgcacggcccaggagaccacccaacctggcagatgaaaccaaaaacgagaaaaaaaaggagagaggagagagatctaaaatacaacagttctttttgctcatcaagcctgcccaccgatccccaaaatgacaatggatatagatattaacacatgtaatagccaagaaaataagaacggaaaccaattaatgctgtttaaattggctggaactggctggcgtaggaaatcgtttatgccttgttagactgcttggagccgcgaagcttagggttgctggtggctgcacgcttcttctgcttggagcgcgaagaggtggcgtcgctaccttcaatgaacttcagaagctcgtcgatgctgcgagagtcgagagccgaaggatcggtgggagtactgatttcgggcgcagactggccaacctggggctgaacacgggttcccatggaagacacacgagggttcagagggttgcggcgcagacgacgagcctggatgtccttggcgtgcttggcgatagagacagcgttctgagtgagctgctcgagccagttctcggcctccttggtgttgcgatcttcgggtccaagctgagtgaggaagatgttgtatgcctcgcgcatcttgccgacggcagccttggagtcctggtccaaagcgagtgcctgggcgagttggaagagaatagtggcggtattgatagagtccttgccaaagaggtcctcacagacggagagagaggcctcgaaccacttgcgggagtcgttgtactgcttgaggtgttgcagcatcacggcggcgttgttcattgtggtgatggagtcggggtggttaggaccgtagatgatcttccatacatccatagcatgcttgatgtaaaccagagcggtcttggtgttaccagaggcgtgctcgaatagactcaggttaaggtagctcagaatagtgtcagctgaatcgacacccatagtgcgttcagtgacaatgacggccttgcgggccaattccacagcagcctccttctcatcagtctggtagtacagcatggaaagctggtggtagagcttggcgacctcaggatgcaggataccgtaaatttgctcgtgcagagacaaagactcaaggatgagctcctggcccaactgcttctggttctgcatgagagagatacggccggcctccagggcctcctctgccaatgcgctgcgaggagaggcatcacggaccaaaggaacaacattcaggatgtcatcagcagtgaaagtgacagcgggcttagctggcgctggagcggcacgggtaggggacttgttgtctccacccttcttcttgcccttcttcttaggctcctcgtgtgtggatccgttagtgataggaacaacaacctgctccttgacctgatccttggtgaaggcgaaatcacgggcaccaagctggatacccaacttgatagagatatcacgcagaagctgcaagtatctcagggagttgctccagtccttctcaagggagaagcggaagcggatggtgacctgcttctcgatttcggcccggagggactcgggagtgacattctcaaaagagaaatcgccctcggggaagatcgcacgcagggattcgtcaatctccgccttgggagtagcgttgacatctgaaccgaggagacagttcagcaggtgagcaaggcaaggggcgacgaagggggcgggaacgttgttcaggtagcggttggcaacgtgcttgaaggcacgagtaaccatttcctgaaccacgaggatggacagggcctgcaggcgaggtcccttctcggcggattgcttggccaacgttccgaggtaacggaggttgataccacgcttgtgcaacagctgggtcagcgattgaccgtccatggggaagccgacgtcgccgtcgtgcaggtccttgagcaggtcggggatgaccttggatcgcaagtgatcacaggcatcccggacttcttgctcatcctttgcccattgcttcttctcctcctcagtctggggcgcctggccgctgaaaacatcggggttgagagcaaggtggaaatcagagatgtcaacacgatcctgctccgcattctcctcctcaggcttgccctccttggcagcctcggcggcagcagccttacgactctccacctgggccttcacgtactggctcatcttgtggcgccagtaggactcgaccaactcaagtctgagaacggacatgcggtgggggtaaacatcgcttccatcttcttcctgccactcgacatccagaggagccacgcggtagagatccaggacgtacttcctgccgtcagtgcccaagagtcccttagtctcgacgctaccttccaactcgtggcgcttgttttccttgtcccagacagggtgctgcttgacacgcagcgccttcgagagcttctcgaagaccgggataaagtcagcgtgagtagccacaacctccttgccctcaacaccaccgtagtcaatctggtgctcaccgggctcgcgctgcttgaagataccaggaacaatgctctggccaacaatacgcttgcccaggtagtcgaccaccacggttccgggagtgaacagtccgtcgatatcaagctggttaacggccttgataccgagaacatccttgcccacagccacacgtgcggcttcgtcgccaccctcggaggtgaaagttccaacgccatcggcaccgaaagagtagaagatgttgttgtagacaaagatctgggcgtcccgcgcctcagtggggttcagaggagcaacctcaccccgggcaacaaggactgcaccacgagcggcggcctcgttataatcagcgaacagcttggaagtcaaacgttcccggaacacgcgatcctgaacggtctcgcggggcagctcgcgggtagtctggaactcctcgttccagtcacgcagagtctcggcattatcaacaccagagatcaggtagttctcctgcgaacgggtgatatcgggctggtgagcattcaagcttgaactgctgggggcgatgagccatgggctgttggggatggcgttctggaaggggaaagtggtcaaaagatccttctcattgttgtactcctgcagggcctcgaaggaggcgtcgaacgagggcgagagttgagagatgagagtgagcaaggagtgggcgctgcccttcttggggtgtgttggcttcggggatgggtcgaatctgacgctcgagcacttgttcacgaagaaaccagacacatgggcagtgatctggaattgttcaccttcgttagtagaaaccacgaggtaaagcaagtggcctttctggcggaggttgtacggaacagggttccatgcagacaacgagatagacttcactgtctttggcagaggagcctctgcgatgggcaggatagtttgcagcggtgaaggtccagtgaggtcatatttggagagcgagtgttccttgtccgactcgccggccttgatagcgtctgccgtgatagcatcgtgcaaggacaggccagcggagataccatggaggttatcaacacggtcaccagaagcaccaattagctccctgatccgcacaatatgcatgcgggcttccttttcggtgtagggatcttcgaccaggacgatctcggagtcggcctcgaggtctgggacctcagacagctcaacaaagtcgttgatgcggttgccgttgaactcgaggtggaagcaagtgtattggaaggttcccggtaactcgacaatggattggcggacatcctggacctgttcttggctggagacctagaggaataaacaggtcagataaattttcgctatttgtggcttttccaaacatcgaacccaccatcacttgaatcttatgaggcgcatgagggagcttcacggtgatctggaaaagacctatagtcgggttagaacgccgctacacagttttgcgcctgtctacaaaacataccaccggtgttgtcctcctctgtgccctcgggggcattgccattggtaatctcttgggaagcttgaggagcctctgttcctccgttagcttgtgtgccctgcatcttgttttacccggagcccatgctgtattctaatagaccttgtccagcacggaggttccaaggaacacacacctttcgagtgctccaactccccattggtctctgccattatgtcgagccggttatgaagagagcttcgacgaaagaataacagtaaacccttatctcacaaccgtcacgcgggcgagagacaaagttcgggaaaatggaacgaaaagaaaaaagttgaagaccagtggagcttccagggattcggcagatagaaatcttaggatagtatacaatataagggcaattgagcaagaaacaaaaaccccgtaccccaggaagttgaaaataaggcaaggatgaatgaataggacggtgaaattgggagaccggagagaaaatttctcggatgcggcataccctcggaagtgctcgggcggtgggtttcaaggaagagcgcggagaggacattcattctccacagtgtctatattttggctgtgactttttggcaagggtgtaattagtttgcgattatatatagattggaaatctatattcctgccaaggtaagcctatataattcccattgattggatgttgacttcaatcccatagatctacaagtatgacgctgtagtgcctcaggtatcaatatttttcgaatgtgcattagcgattgtgtacaccgtggcattttacttttcattttaattttattggtaataaatcatttcccaggcaaggtttgtctttaattagtctatcttaatatgcagaagataaaatgtgtatcgtgaagacggtttaattctaacggagctgacgctatatgtactatgtacttgactaaaaagagaggggcgaggtagggatatagatggagcaaaattaaatgtttgaattctaagacctagtgctcgaggaacttttcaacttttcaacttttcaactgggtgaatgagtggattatagactctgccaggttgggtatatatgtgacgtagaacaaaggctgagatctataactcggggtttcaactattctctagtagtagattagttacctagatacatatttacttagtcatcccttctagcagattgaataggaattggatgagcccatggattggatatcgcaattgttagttagaatccacgtacagcatagaggctatggtactttatagacaccttatttactctcctaaagccaactgggttttttcaaggatccactgtcttacacagaccttgaggaaaaccaattagagaaaccccatatattcattgtagtaatacatactctacttgcgcaacgtaaatagatggcgatctgattcgccaagccttccgcgtccctggttcatcgaggctgatgttaacaccacagctcagccacaacttaattcttttcttgaactcctttctttcttctagtctttcattaacctcttttgtttccttgttttcttgtttctcttctgatactcagtcttttcgatccgcaaaatctcccacagtctctctttcaccgacgcgtcatcccctagaggtgtggcttgcgcaaccatctacaagtctagaatcctagcagtacactccttcaacctttgtgatttatatcgatacaggtcctacacagccatctgcagttctggttatctttgacaaagatatacattctcactctcattgcctttcactggacttagcaacccgtacaaacaaaaaggccaatcacgatgctatggagccgactcgcacagcctgcgaggtgctatgcccgacagggcctgccaaggcctcccaggactaacagccgcgttgtatcacacacatgcaagcggttcaactcaacccctggtcaaatgaatccaaacccctccgagcagaatgattcggatgagggcaagggcaagggccagggccgtaacggcgattctgaccccaacttcaaatctactattctgaaaatgcttgaaactgcggcaactacggcagcatcaattgctattctagggtaaggtgtacctgcattattcaaggcatgcgttactgtggctaattttctcccaagcgcggctggttactcctatcaccagtactacaagtacctgatcttggaaaagatggacaatgcgttcgaaccaggtgatcctgccctcgaggtcgcgggtgttgtttctgggaagcaccagtacagccatgaggaacattgggtcattcgcaacgagcaacctagaattgatgatattgtagctggtaaacaaagtggccactactatctaattatcggtgaaaagggcacgggcaagacgtcgatgcttttggaggccatgcgcaagatcaacggcaacagctgtgcgttgttcgaagcgcatgctgatcttgaaatcttccgaatccgactgggcaaagctttggactacgaattccatgaggagtaagcttatactgttatcatcttaaacaaataacgctaatgggagtacccagctatattggcagccttttcagcatccgtggtccgagagacactacggctctcttggacattgagcgcgccttcaacaagcttgagaaagtggctctcaccagaaggcggaatgggtcgactcctcttatattgatcatcaacagtacccacctagtccgagatgaccacgacggacaggatttgcttgagatgattcagcagcgtgccgaacaatgggctgctagtggtcttgtcacaacaagtatgactccaacaaacgtcggttcctcttgccatagctaattttgttttcaagttcttaacagcgatgactattgggtatacgagcgcttgaagcgttatgcaacccgcatggaggtcattcctgtgtcagatctgcctaaggacaaggcgatgagtgctttgaagaaatatcgccagcaattccacaacgagacacttccatatgggatcctcgagcaagtctatgacaaagtcggcggtcgactatccttcttgaaccgtgtggccaaatctaaggatatgacacagacctgcgatgaaatctgtcaagcggagaaaacatggttcctaaataagtgctggatcctcggaatggagatggatgatgatgtgatggaccagcagaagtacgccgtaagtacacactttaagatcttctggttcttgttacttcgatgcaactcagaactaatttaaaccacaacatagtctgctgctatggttctggcgaaagcgctggtagagaaagagaaagagatggagtcaaactaccacgaagagcaaggccacatcctgccagaaattccgctccatgaagcgcgcgagatcatgacccgtgctgacttcattcaatcttacgatcacgaaaatatcttcaccattgattcaagagccatggtgcgtgctgattccgtacccatgcagcgtgccttccaagaaatctgcgccaaggagaacttcgacaaccacctggacagaaccttagagcggattggagatatcgagagtcttggccgtactcgcgaattgaccatcaaagatctctggaataatggcaagtatcgcatggttgtacgggacaatcgcggacgagagagtgggacagttgaatttgctgtggctgaacgtgaaggtgaaggtgaagatgaagactagttattttgtatatgtcatacctagattcacaaattggaggtcctattgtaattacaaatctatactatgtggcagccctggagacatcaagtcgccgagtcctcgaatctggcccttggaaaggcaagagtgacatcatcgtgtgctcaccgccaaccaaacatttggcccgccttctctttttctcttccaagctttaaccgcgtgaacacaattaccagtgatttctactcttgactctgcatttaatttaactcgcttttcacatctacaagcctcgaagcctcaaaatgccgactaagacccctaagaaacgaactgtatcgttaagtgaacacacgcgaccggcgcgtgagctcgcgatcgcggccactgcacagacctctcgattggcgtgcatcccatctccagcgcgcttcatccttgtcgttttaagcagtctcactttgagctccgttcttttcacactcacctctactttgacggttggcgatctcgggcctatcagcaaacaccttgaggaatggtgggaagtgggcggcttgatcgcctggagggctgtggaggtcggattagcttgggttctaggatttgatggtaagtatcaataccatacacatggccccttttgcgtccggactcgaggctcctacagctatatagacgatgcaaaaaactaacctcgtggttgcgattaggccgtgatgtggcatcgttcctattcctgacgcacctaccgacatactctctcttgtcattcttctacggcatccgcccgacttctgcactggtagcatatggagtcacgattgtctccacggcgcttcccttcgcactcctgcgccggccctcgtccgtccacaacctttcgcaaacacctgctggtgcagttgccaatcgaaacattctacaggataagactaccactatattcacgactctcctggcaacctcgattttcagcgttgtgctgtacgccagctatgcgacttggcttcctacacagctggtcattcacttcgagggcctcccggatatcagcgcggcgcatgctggtcccgctggcttgcctgttctcttcctgacactgattcctgctggctgggctgcgcgtgactttttatttgttagctctactggttattcaaccgctaacgatgggtctgcaaactgctgcgagggtgaatatttggttgcggccatttgtcgcaacacttggggcaaactgaccaccaagacgagagttttggtttctcggtccattgtactcgcgcttgcagtcttactcaacacgattgttcaagtggccggcacaatcagtgatgtctctatcgaaggtgctgccacttggggagcggtctggtcattcgcgatactgattgcaggagccaccttcggctggatcgaagccgttgatggcgtatgataatatgtgataatgacagcatgagggattgtgctcccaggttgattttcgtttcagctgcgacgggtgcgcgagaggtagaggcagtgacccttatcctatttcttatggcgcgcttggttttgatatgtccaatggttttcttgaattacgatatataccttttgttgatcagctgtggggttattggcctcattcattatcttcgttttgtaaaatccccgagtcttatcttttttttccaaatgtcaagtactgcttcttcatacttcttcacactcggaacgttcctctattaccctttcgttattgtttgaatctgatatcttgaaaatggcctggaattgaaattaatcataagtctatgtcattggaacgttaatcgctgtataacatccaacaccccaattaagtatctagtatttgctggggcaaatcgtacgtaagaagtgacaggtatagagaagcaagaccaatcccaaaacaggaaacaggcaaaccaagtaacaagcacaatgatcaagcaatcaccagtgagtcggcggccccccgtacctgtccggttgatcaaccgaagtgcgctcggttttatacgaatcagccttctcgttattcaacatccatccaggatgcagcacattaaacacagccaccgaaacaatcatcatagccccatcgagcccaataaagtacgactcgtgagaaatgagataaccatcccatccctccgacaactcgatcgtacgatagatactccgaacatagatacagatgatggaaagtaccatcgccccgaacaggggaaggatcgagccggaccccggctgcagcagattcttgcgcataacgcggcggatgaagtcgaccgcgcaaatgacgaatatggttaccgagaagagctggaagacaattccagcgaccatgatgtgcgtgccagttgcggtgtcgccgccgaccgtattggcttctccggaggccatgccgccgccgatggcttggacgacgagggagattacgtcgcaggtgcagaagatccataggtacaggcttggcttcaggaaggaggattcgcggccgaggatttgaatgaagcggcctaggacgacgtagattcctgctgtgaagaaagttggggctgtggaatgttagggtgggcatggatagtcaagggcaagaaggtagcttaccgatgatgagggtggagatctgcattaggaaggcagttccgttgtatggacatttggctgaccaggtacgaccggcccagccgattacttcgactgttgatgttgttagtattgcggggagttagggtttcaaatgtcataggccttacccaaacatcccacactaaacacacttgcccaccattgtcgcttccatatgaactggattgtatggataatcaacgagaggccaaatagggtgcagaaggcaatgcctgctcctagcgatgggatatatccatatgaggtgccaacgccttcgatataggcaggacagccgtattgcagctctagcacgtcgaccatggcgagaaagaaaacgaatgaccccgaggaatctatcaggggattggcgagaaaattaaagctaacagtaaatccgtagtacttggatggattgaaagatagacagagattccccagacgactagagaagagatttatagacaaccaccccgtttgtccaaaatcgaaaagataccaaaagagagccaaggatcaggcttcagtattatccacgcgcacaatttgaatataagtgagaaagagtacggagtaagagcatggccgagcatccactagccccaccatcgggaaagacctttcaaggccaaagccacgggtctctgaatgcactacggagtacaataatctaccggggaggataagacccgcatcggcgcaaccaatcccgacattcaagttgttcatgtccaatggccagtttccagcgtccaaagcggattgagaaacaggccgactccggttggtatagaaaggcacatccataagatacggtaaaaagcgagcaggcagccaaccgcctgggggtatccctagccgatgagtattgtactttatacacccgacggactactatgatgtggtagattaaggatggcgtcaaagtcaagcctcataaaaaatgggcgcgatctgatagataaccgggccgaactacaacttacctcgcaagcctacactctttgggattagcgtggatgtcgccaagtttgcctcataagggattctatttatctccgctaaaaccgcacacaaagaagagtcttatgaaaggtctaaatgcgtcacgacaatcggtaaccaagcgctaggcagttggagagaatccggcttctatatctccgacttccaacgtcactccatcctacaatagacatagcgaggctatgtctacggttgctcgtattcaagagtcagttccacacaccgcttcaagataataagagacaatcacaatcaaacagatcaagtctggctctggccctagttttgtcgggatatcggatgaacgacaatccaggtccgccgcctcggatggcgcggatgtacgtatgtgaaaaaaaattacgaaaaagagtacgaggatccacatgcaccttattcgtgactggttatttgaatatcacatcttctcatatcggcttatgcatccctggacaacataatagactggcaacgtccatgaatgttaacaaatagccaaaggaactcatacttcgtatacttataggcaagccagaaaaggtaacgatcgccgatcttcactctagcagatcgcaaaagcagtggagtatttaacctcacgaaaagcaggccattcacacttggtacagccaaataaaaaattctccgataccgattctccaaggtccagtcaaccaacagaacaaaggtatttcccaagtatgatgaccaaacggagattgagtctcgcctgcaacattgcggcggtattccggccggacaaatcgagtgagcccatgcaaccatgcatatgtactccgtatagcgagacaactcagacacatgtcacccgattggacaccccgcccatagtcagtggcggagccgggggccatgcgatcgcagagagtgggggcgatgtcatcctctgtatggatcgggagcaacggttttcgtggggagagatgcaggagattgacactggtgcctgcatcagtatatccccatcccccacatccattcgcttcccagaaatcctccaaactctggccgccaagcatggcaccctgacatggtaccaaaagtacgtcacagattctgggcagcttccaatctcgacccgcggacgccgtgttcgcttacgtcatttctggatacctgctgggtgtgctagggctgcgatgattagcccggcgtatgagtgataggctgattgaatatgatgaatcggctctcacgtgtcgctgagaatcgcgcaccttcatctttttgttgactgatcagaccaaggttgatatgaacagacgactcggtgaccttggccagggctctgtcttacctcgttcagctactcttgctaaaacatggctatagtaaacctattcgattgtggatgggcagaagagaaggagaaggtaaaaaaaaaaaatgacgagctttcattttggtaacttttcatgcctgattgctctagaataactgacattgctttaagaaccttggaactactcaagatcccagaatggctcagccggtttgtggaagttgtggaattgtggcgtgtcatagatacccggaggatctatgagtgaaagtcagtattgcatggaaaattgcaaagaggatagagtactcaccgtcgcggtttgccacaatatacctcctcgtgttgacgatactcccctccagctgagcattcagctcctgctgatacacccggatcttctcatttcccttggcagcaccatgaatagcgtgctgagcgacatggtaacgcgagacacggttgagaagcatcatatcgaaaggcgtggtggtgctaccctcttcaatatagcccgcgacagtgacacgctcaagacgcggacgtccaaagagcaagccctgcagctcagttgggtagccatggtaattgaaatgaataggcttatcagcagtgaagagggagtcgaatgcctcagtggacagggcatgtggatgcagaccctggttctcaagaatcatcaagtccgtcacgttaatgacacaaacacgaagctctggtatgagcttacgcaaaagcgccgccgctgcaatgacttcgaacatcacctcaacaccaataccgaccagcacgacatccggattaattccttcgtccgtgctacagaacttccagatcgaggctcctgcgcgacagtgactctcggcctctttgggggtaaggtacactggagttggctgtttcgaacccaccatcagattgacgtagtttctcgactttagacagtggtgaacggttgtcaggaaagtattcgcatccggtggcaagtatacgcgagctgcagtgggcttcagtttcagcacagagccaatgaaagatgggttctggtgagagaagccgttgtgttcctggcgcgtccaagtactcgattcgatgtagtttatactactgacgctggtgtgccaagttgtttccagcgcctaaatatttggtgagcatagaattgacattagcaagggaaaagggaagctgaccatcttagtgaactttgcatactgcaccatcatcgtatgaatgatgccgaggaagctttcataggacgggaaaataccaatgcgaccggtcaaggtataaccctgcaggaatccttgacacatgtgttcgctaaggatttcaattactcggccgccgcgggcgttggagaactggtcccattggaaattgcggtttgtgccttcaaacacctcatcgagcttgttgctttccagctcgtccggtgagaacaatcgcacgttcgtcgggttatccttgaatgtctgattgatgaaactgccaatcactttcatggcgcttgcgtcagagcctttctctacgcagaagggcctccaatctggcaaattcggtcgtttgtaaccattgtaggcttcaatgcgctgaccaagcttctttttgtcttctgtgggaatcacagacttgatctcgtcaattacatcaccggtcgaagtgaacagctcgtctggtttgtaactagagagccacttctgcagcagatcgagttgttccttgtctgtctttgccttgggcaatggcacctggtgcgaatggaacgagccctcgagaaacatgccatgaacctccttgggccccgaccaacccttgggagtacgcagaatcagcatcggccacctcggtttcatgatcggcttcccagaacgggcagccttctggatcctctggatctcctcgatagcccaggtcatggagaagtgcaaatccgcgtcaatattattgagatcctccacgaagcgaacctggtacccatatccactgaagagagccacaagctctttgtggtccatgcacccaaatattgtgcgctcgctgattttgaaaccattcagatgcagaattggcaaaactgcaccagattccttgggatcaatgtacttgattgcatgccaggacctgtccgctatcagcgttgtacagtgcaaaggggaaaataatcgacgaacgtggcggtggcaccggtttcagcctctccgtcacccacgatacaaggcactatcagatcggggttgtccatgacagcgccaaaggacactgctagagcgtatcccagttctccaccttcatggatagcaccaggggtttcagcattgatgtggctgcgcataactgttagccgaagatctaaatagcatggcaaggcaaggcaccaacctaggaaagccagctgttgtgctaaagctcgagatcagtttgtgcaggcctttgctgtctcgcgaatattcgggataaaatctctccagcgagccctctagccatagtgcggctaggattgctggtgcaccatgtcctgggccgacaacgtacagcatgtccaggttccttgtccggatcaggtagttcagatgagagtagaccaaaattaggcccggacatgttccccaatgacctgggggtatgacatcagtcacgatggccgaattgaataattcggggatgctactcaccgagtagtcgaggtttgatgtcgtgaggtgtgagttccgactttaaaagagtattttcttgcaaaaatatcatagctagcaataagtcagtcgcgccgttgcaatatatatagcacataaccacaattacctgccgcaatgtaacaagccgctcggcgaaacttgagcaaggcatcacaagctttttcatctagtttctcatgatccaacttgacgctcagtttctcaagataatctggtagatacgacggcagcgcagctggatttggttggtctataatttctgcaggcatgatgaatttgatatagtagggttttagtgacttgacaggagcaagagaacattgaatgagttcaagacacaataggtgaatgagtgaaaactacaagtggaattgaaagaaacaggcaaagaaacaagttgccatgaaacatgccgtgtacttcgtgttatcgacgtcagcccacacaccctgacatcactacggctaatccttcaccttttgaaattcgtgccgattttcaaaaacacgctcgacgcgataaaacaggttcaaaatgactaaatctatcctagctgttaacgcgggttcatcttccgtcaaaatcaacttctataccctcgagaacccaccgagactgatcgcagatgcgtcgatctccggaattactgcacccccacctacattcaagtaccacaagggagacaagaaacacaaacaggatgtcaaacaaatactcagcaccccccaagatgcattcaagtatctcctgcagcgctgttttagcgaccctgagctttcagaagtcgctagcatcgacgatttggagtacatctgccaccgagtcgtccacggaggagactacctcgacgcagtcctcatcaacgatgagacacttgatcgcttgaagaaattggaagacctcgcacctctgtaagctcatatatctcgagtcttcatatttccgggattttatacctggaatcgactatatacctgccttggtcaataccccgctaaccccgcccgaccaaaagtcacaatttctccgcgctggagatagtccgcctgtgcaaagcagagttccccaaagttccaagcatcaccttcttcgactcttgtttccaccagacaatccccgaagctgtccgcacgtacccaatcaaccaggaaattgccaaggccaatggtctgcgcaagtatggcttccacggcatcagctactcgttcatcctgcggactgtagcacaatttttgaacaaaccgaaggagaagacgaatcttatcgttatgcatatcgggagcggggcgtcgatctgtgcgatcaagaacggagagtcggtggatacatcgtgagtcccgcaaagtttatattgcatctcaatctatctcgagttgagagtcgtgctaacacggtgactagaatgggcctcactcctttggcaggattacccggtgcaacgcgtagtggaagtattgatccatcgtgagttacatccaatgggctttcttggcaatgaaactatggccaactaatacttggtgatctagattggtcttccactataccaacgaagcaggccatctaaacccaggcagcacgacaagtatgcatattagcacggtatgaatacccaagaaccagtgccaaaaaggagagcaaggaaaatactaacccaatccaacaccttcaggctgagaacatcctcaataaacaatcaggttgggaagccctcacaggaacaaccgacttctccaagatcgcagtggcgaatccaccaaccaaagcacataaacttgctttcgatatcgtcgtcgaccgcatctcgggctacatcggcagctactacgttaaactaaacggtgaattagacggtgtagtcttcgccggtgggatcggtgagaagagtgccttgctgagaaaagcacttgtcgataaatgccagtgtctaggcttggcaatcgacgatgcggctaatgacaaggggcctggagatgatgagacggtcaaggatatctccaaggattccggcaaggggccccgggttttgatttgccagaccaatgaacaggtatgtggtctcaaatattgaggattattgaccgtgaccgtaaccttgacctctcttggaggtgaaggtttaggttataggttgttttgctttgatttactgacttgggatttcacttacagtttgaaatggcataccactgtgcagcttcgaggagctgatttctcatgcgcggtgtctagttttgttattagtttcttcttcttttgctattagtagcaacaatagtatcagtatctaccttggtagttaatagaagaggttggggggttgaacatggttggattacgacagatataaggttctctacattgtacacctgtattccgtacatacttaatcgatattccaaatagttaatcgaaatcagatccaaatattaaaaagcaaaaagcatgtaacatagttggctcttgtcactgagggggggaaccctatgtggctgggttgacaggtagtctccgatgggtcatttcagccctggattgccaaccccggtgattgggaatcgggaagggtgcagtcccaggtacttggtcatatatttacgcctctttcaatgcaatgcagcctttatcctttatcattcctggtacgtgagttctgcaacagcatacagtaggtagggggagaagagaggcctgaggacacagtccctacataccagcgctagcttgggttactttgctgtggatcgtgtaccccatactccgtacaatcgaacaggaaatgaaaaatcgaaataaaggggaaatgtaacctgcagcaggagtgaatgtgacacatccaggttgtcggatttgatagcttcggggggaggcacttccccggttctcagagttttcgattgtatgcaggaccacggcaagataggtgattgacgcgatcgagggcgatcgcctcggggaagatcgaggtctcaattgtggtcctggtagctctgatgatctgcaggttagcgggttcagatagcacattgcaattcgcgaagtcaacgagctagcgaattaggaggcgcccctaggtcgactaatcaatcttgcattgctatctagaggatcagacatcaaatcaccagtgatggcgtccaagggctaaggccgcattgcagagatcgacactgcagaatgcgaatgtacttttgtttctttggctcagcagcgtgtcatacagctgcacagtatactccgctacatgtcaacatatctgcatgtacacagtacagagcgcgtgacgcaggaggtatgtacgatgtacttcgatcctcaggcatgatcccccgtgcaggagtacctcggggaacattactccgtatccgttgacacacagcaagtggccgcggatcgcccgaccaaaagccggtctatatcgacgtgggtcgtacctgattgtatctgtgtggctcgatcagtcataatctcctccttcgtgcgtcatgtcgtgacaactaaaataggtccaaagtaccgaagtcaggggttgacccagggaaaaaaaagaaaggggacgatcgaacccggcacactggtgctggagctgtggagctgacgatcgtcagttttggttcttttctgcgagttaatcaggtaacccggtcattgatgtgggtatgggcctgtcacctcaggatccaaagagtccagagaggtctaaaaggtcagtccacttttttttccccttctttgttcggctgtgagctgccgtcgtgtctcatgtttcgggagtcgaataggaaggccggaacttggtggaggcgaaacgatttaccaaataaaaaggagaagctaggaattgaggcggctgaaaaaagcgtttgtctcgggacggggaagcggttccagttccaactgattggactttaatttgcgttctatttcttcttttgtccttctattcgacccatttggtccctaaatgccattgaataatagcggagtaccaacggaataccgactgtggacactacctaagtatagcccgttacaaccatcagctatggagcacatagtgcttccagaattttccatctatggagccttcctttgagagaatcggaaaaatgaatgaagatcgcccggcttcacatccgcggcgtcctagtgcgctatttccctgctcctatccatagtgacatttggattgtacgttgtaagagacgactccaacgccacacacccagaggaaaaagtaaacaaagtcgagtcgatatcccaatttcaggagcgataacacatccacatctgtcaaaaagcaaagagtccggctggggcccgatgcatccggaccgggaacccccctgcatcctgatgcgctgcaaggcaaatctccaagtcaatgcgggtggtgatccgcgaccgttttgtctcgatatctcgacgccacaatcaaggcgtatgcgggtagctacgatttccagattcaaaccaaggaatgtacttttgagaaagatcagtgcaagataaatacaacatacaacagtgtacgtaccatggatcagccccgggaagactaagacgttccggaaacgatggaagccggttcatgcaatcgccccaaccttgttttcgaactaatgcaccctccctagactttatctcggcttagtacatcatctagaaccttggaacatcgacaccgtatgaaccgtcgtcttgggtcatgcaagatccagaatccgttgggttcggacgtcattcccaacgaggaaaaagggggagaaataccgaccaaggctattaaggttgactgtgagaggattgagctgatggagctgatggggtcgatggagtcgatggggactgatatggggactcttgtttttctcccggttctagcgcccttctagctgtaattgaaacggcttctttccgtacgataacagttcagttccactataggaagctggatcataggctttttttctttttttttttttttttttctggattaggacatggaaatatgtttttacacattagggtatgcttgtgacttcttttcctcaaaaacagttgatccacacgatgctctccagtacggggggaagtatggagtagttttcccctattttgaacatgtggaaacgtgtcactgggagatacgcctgagataaagacacgagagagaatgtcttgttccaataatgagaagcgtaacagagcaagccacaatgctaggatgtagaggtgagatcgatcgaacatggttacgttgagaactctgaatctcttaacggtagccatgtacggtagatcttccagcccccgatttccacgaggaagacccagattcaagacccgcgggagaggaagttcctccattcggtatggtgtggacacgggctgaaacacgcctacgagtccctttcacaagcctagaaggtcgttaatgtgaaccctgtcagctgggggtcactataccgcaagagggtgattgtggctgaccgtggtgagatgtgtcggccccagtgtggcaaattatgagagcggatgcagatacccttgattaccttccagagcctagattatggattatgggggtggggcttcctctccgaatgtttctagatgttatgtgtgatgtacggaggacggagtacatcctgtacaacacctgcggacaccaaggttcttcattgtctctacccagcgtgccgggaacgaaaagaaaggctagaaggcgaaaagaatgttcgtacgtaaccgagacgggattttactttttcgatcattacgggggccctccttttgcttagtgtatctccaccccctatgatggagcccaggatcgtaaagataatcctcttttcttttttttccccttcttgattggggcgtagggaatcatcagatagacacgccgggaatgaagtcaaaattccgatatgttggaattgcttttgataagtcttgtgtctggttgattgcgaattgtaggcgaatcgacgaggatttgatcccaagacttccgggaccagacccgaagtttgcgactggtcttactaagtgaggattgcacgggaggccgcctgaaatacggatggccttaattaatagccgaaatacccttggagggttggattatttgcatcatatgtcataatccgttcgctgttggggttgtagtttcttgcctcttgaacaacgcactctggactccatatacatacatcatgaaaacgaacaacaccgatggagccacgaccacgcgagaaatatagaaattaaaaagaattaaatccaatgctcggagtgatccgtttctcgttcctgcggctgtttttcccttttctgttctccacttttgcacaaaggctgcccggagatttggttcctagctttatagtggagagcttctatggctagttgatacataatagagagaggtctggacttctgggacctgacagtagtgaagacctgggttggatgtatctcgtggaattgtgatgaatccaagggtacctttttagcttgttttggtgtcataaaggaccaaacaggcgctatagattagaacgtttggagaagaaaggggggacaaatccgttccctattccccgggaccagggacgggagagccgctgtgctaaacaaagaaatggaaatatagaaaaacatagggaaaatcaacaaatcaacaaatatatgaattatatcgaatataccgaatatccaatatcaattatatactattattttcttttcctctttcgatttattatattattaaaaggataaatctaattttgattccaatgcctaagggaaaaaaaaccgtgtatatcaacgcaaacccccctcccttcttgtttcctttgaacatacttgataaccatctttctacacatccacccccctacagccctcctttgctctcccttctcccttgcgatacgtcgatttgaactttttccggatcgaccggagccagttccggagcactttctccttggctcccttgccgtcttaaacctcatatcccttctgcccgtttttcttggttgggattgcgactttttttttttatggattcgctgcagccaccctcgcgcgcatcattttgaatatttcgattattccttgatttaattctccatctctctactcataaaaagcaacgagctgcgacctgtccaccgactcgcttctctccccaaagactccattctcatttgttgggcttcgtcacattcctgccctacgatctgttggaacccgcactggtgccagtggtgattcttcaaaaggaccgacttttccgatcccgactgcatctgcatctatcgcctgcaccgctggtttttatctggatctgattttattctgttaattcgattttctcaactgggggttggattggcatttcgtttgtccgcgcttgtttccccaagggaaacatctatataagatcctggcgtcgacgtcgtgtttacttggtaagtctttctacctcattccccactctctgccattagcgccttggaactcgcacatctcttttctaccaaaattcctacctttcagcatctaaccatgattgcctctgcagacctgaacatgatcctgcgggacctatctgctttcaacatgggaagaggagcttacgatacaactggcgtgaagaagcccggcgtgcctccaccaccaccgaaataaatccattcggaaacatacccttcgtcatactcaacattgctttctacaccactcggtcatgtttcggatggtctggcgcccaacagcggctggagttctctcttttttattttttgacacatgcggtttggagttttacgtgattttggtaagacatgtccactccgagcacacctttgggcatcaaaactaaccgaattgccagagatctgtaacactatcttgttgttcttcgccccggtcacgggtcatacgtttttctcgcctattcgctacagacatcgcgcgacaatataccctatttaattttgctcgactttcgccagcattttcttttcggataccaagcgttggcacattttctccccctctttccgaccttttgatctttcgtctccgcacatgagccttatccttatttttcgggccctcgaaccttattccgcctaacctcacgttcttcacctcttgacacgaatcgataccacggtcctatttctctcaaaaaagtgcctttgtttttatttgtttttatttgcatctcttttgtctctgtttctcgttatcgaccggcgttttggtatagacgggatggaatgttgaatgggatgggctgataccaaaatctagagcctcgacctcacggtcaatagcatgctttgattgctttcttgttttactattggatgggtacagctcccgggtttatttgcatgagtatttgtacttttttattttgacgttgatgcctgtgtataatattttgcgcacaaaaaccataattgtcagcgccaatggattaatttttctctacattctctatctagccagtctagaccaccatcgacttcacttgcagtcatagatgcgctctgtaaccccgagtttgcaaactcgcactcatctcacgtcgtacttcgcttgtacttgaccgaccgcggttgcgctagcatcgggcagatttgcttgccgactaatgccgagacaggaacgacagcccgattgttgatgcgggcctagctagtgcgtcgggatattcccgagcctgaccagggtctttgctaactggcgcccgacatcatcttgcaggccagctaggctagtgcccaatctgcgacagctgtcaaggtgccaggaacctgtttgtctcccgctagcctactttttatcaagtcatagtacacgtatttcgatgcactctttttcaaatcttcatatccatgttatctgcatgccatcggtgcagtgtatccaatgagatgatatgaaccatgctggaaatcctggaacatccaatttaggtctgctgtgagtttctttaattagatacgaagataaactaagcctcaatagaagtatgagcaacgcaaatgcaatgctaggtgcatatgtcagttgtatacttcaaccttggacaggcctccccgtgactggtgactgacgaccgcgctaagcccaatcgaggcacccatcatcatcatccacctccgcctctctccaacttcaggttcaatcacccttgtttcgacaacgtctatactacgctttgcatttctcattcctcgaccaggatttaactactttaccaatactaggcacaagcaacgcctcgtgtcccgctgtcctacccccagacagccccattcctggcactgtggctactagctgaatccacctgccacctcatccggtcgcctggtcgctgatcgattgacagtgaataacgcacagaaggacgcctaactgtcacctttgctcttaccgtagtttcgttgtctcagccatgtccgaatcagcgaacgcaaatgccccgaagccgagcagcagcgtcaagcttgtgctgctcggagaggccgcagtgggcaaggtactgctctattcgtcatgttacatgattttgacagctaaccgtctcttgttattcgcccatagtcatcgcttgtcctccgctttgtcaacaatgatttccaggagaataaggaaccaactattggcggtaagatttccccatggacttagccccccccccacaggatacaaggtactgttcctggcagatcataaactttttggagaatccagggacggtgtgttgtatccaaaattgagttgttccccgcaaacggggcaacccggccccttaataatactttgcactagaataaccatctaacgtcgtctttccagctgcttttttgacgcaaaaatgctcccttcctacgcgcacgatcaagttcgagatctgggacaccgccggccaagagcgattcgcttcgctcgccccgatgtactaccgcaacgcacaggcggcgcttgttgtctacgacgtcacgaaaccctcttcgctgacaaaagccaagcactgggtcgccgagctgcagcgccaagcgagccctggaatcgtcattgccctcgtcggtaacaagctggacttgaccaatgacggcggagatgtttccgaggccgttggcgctacacagagcgagcctgagtcggcccaaggtggagatgaaggtgccggtgaggaagacgaggggcaggatgtcgtgtccggcgatgctcgcaaggtatcgacacgagacgctaccgcctatgcggaggatgagggtcttctgttcttcgagactagcgccaagaccggaaccaatgttgtggaagtcttcacggcaattgcaaatgccatccccgagagcagtctgaagactggtcgcggtaccggtgccggaactggtcagacttcgttgggtaatcggtcagcagaagactcacgggtcaacctgggtgatcgaaatgctgctacggctaaggaaggctgcgcttgctgatttgggtcttttttttggcagatgtttttgcaattatttccatggatacgggcgtccttcttgctttttttgttgcttgttccggtttcgatggagactccgtgtgctcttatagtacatagtgtgctactctccctgcagcacctcgtttcagcaatgattagagtgtaaatttttgagattggcattggcaatcagaaatcatctccagcgtacctacataccgtgaagaataagacaatatggccagaaagagtcccggggtagagttcttgactaaagacgagtcggatagtggatccccttcagcggcagccccccaatcagcaacgagccctaagacggacacgctaaactaaaacaggaaatagcgcgccctaagcgaatgcgccgatcccacagcaaattcccattcgattcaatctgcgaacctcccctccgtcgacatcaccaccagcacttcccgcagcaccccgtcgctcgcaataatggctgccatcaacaagatcgcccccaactcgccgtcccggcagaacccctccgagctggagaccgcgatcgccggcgctctcttcgacctcgagagcaacacacaggacttgaaggccagccttcgtcccctgcagttcgtctctgcccgcgaggtaagaattgttgtccgaggctcccgacatacggattgaatcgttctggaatggcgtctgtgaattttcgagggattcgatgctccggggtatattggttgaatttgtggattgatttcaattcttatccaccaacaccaaaaatcatcaatatgcagaggaatcatcaacaaaaggaggcaatatacaaatggatatgaaaattcgcagagcaagacgccgttccaagaggaattctgtttctgtgtgcaggacactttcaaccggacaacgctctgacattattctcgctatctaggttgaggtcggccacggcaagaaggccatcattgtcttcgtccccgtccccctcctgaacaacttccacaagatccagcagcggtaagcaaccaccaacccttccaaccccaatgggccaaccgaaacaaagccactcaaaccaaagaacaacccggactaacacccgcctccagtctgacccgcgagcttgagaagaagttctccgaccgccacgttctcttcgtggcccagcgccgcatcctgccccgccccaagcgctccgccaactcgcgcaccacccagacccagaagcgtccccgctcgcgcactctgaccgctgtccacgacgccatcctcaccgacctcgtctaccccgtcgagatcgtcggcaagcgtacccgcaccaaggaggacggctccaagaccctcaaggtcattctcgacgagaaggagcgtggtggtgtcgaccaccgcctcgatgcctacggcgaggtctaccgccgcctcaccggccgctccgttgccttcgagttcccccagagcggcgctgagttctaaatgcacatttagaattctttgttcactttgactttttttggggctagggggcttggaatgtgctcggctgatgcgtgggagaatggcattgtttctaggttttgaattgttgcttagattcaacgccattgatgggttccaaagagatgatctccataaaaaatgcattgacggttttttctcttttctttttttgcccccagtcactggttgcattgctttgtgtgtccggtgtgagctctgggtgaggcgatggagttgagttctctctctatctcccgatctaatgagggtgggatggaatatctgatagtattccaattcaacgattccgacttttcattgcttctttagatgttttgtctaggattggatctagcctgctggtagattataggcttgattacccctggacaactagatattgttggataagtagctcatctgctgttattgacttggcagtatcagacccaaacgtcactagacgatatgtattatgcgatgcttcatgaacgggaaaaaggtacactcgggggtatgaaaggtatacaacgcaaaccagtcgacgcaaaatatgaacaaaacaatgacatcccctatttatctacaacgaagcctgaattcttcccacaccaagcaccatccaatatgccaactccctggtaaccttatcatcaggcttagatccctttccgacattctgctgatcaagctgtgcatccgcatcccaatccatatgcacgaacaccggaatctcaagcacatcctcatcctgcctggaagccgcaatcgccgagacatccacatcattagtctcggtatccgcatcgccattgccgttttcagcactactcccaggcaaggtaccagggacaacctccaacacgacggtcgtccagttccggcccttgtcccacaccttgcctgcctcggggactccgcgttgagcgccggagcgagactcgctcgttaagggcgcagagccaccctgcaacgcctcgtcccagacatcgctgttcgcgccaatctcaaactgcggagagagaactgtgactttcgttgcaacgcggcctggggttacggggggcgtggcgagggtgatgcggacggggtcgaacatgtggttttttagcgtaagaaggacgtggattgggcgcaggggtgggagggagttgaggtcagaggttggggccatggctgggagggctgacgtggaagagagggccagagggcggagggttggaagggggatgtagctgagggcaatgaggcggatgcggaagcgagtagattgcggcttgctctcgggcttcacgaggatgtgcttgcaggacttgcagcgcttggctcgcttggtgcggagaaggactgggagtgggaggagatcgtcaacgaagcggacgtccggtgattgggttgcgcgctggtctattgaggccatgccatcccagccacattctggagactgaagtcgtgcaataatgtccgcttcgttgttttctgaagcgatcagaaggccctcgcttgcagtcagagcttcgcgcataacaggtggcttggatttgggcttcttattgccgccatacagtccgcttagacgcgacgaggtcgtatacagagacataagccggtttagggcgcctggcgaagagaatccaaattccgagctaagacgatcatttgctgaatttgatgtctccgcgatttgtgtacgatagaagttcttcagggctgcgaaccgggcatccatgcccattggaggtgcagccgggtcttcttttgatgcagcttgctctccatctcgctcgcttgcgttggattgcccatcaatagaggcatagctagacaacggatgtttcagatctccataagagcgagaagcttgcctcgagcggtcgaaagaagcaggggcagtggaatctgtcatcttttgcagttggctgcggatattagtcggcttgtcgaatttgatgccaatgtctagtgttgtccaaagacagtatccgcaagacaacacccacggaccctgttgaggcccgttcccggtggcattctcaatggtagtcacagccagcggggccgtacagacaggacaattgaagcaatttcggccacacctagtgcgtgttaacggatagtcgaacacaaccctttacaccctagtacataccgattgccatcactccgcaccatactgctcggcgtttcaaacaagcagctaggacaataccagctcacaatctcctccgtgatacatcgggggcatttgatctggtgacactcctcgcagtagagaagctgttcaggcggatacagcgagaagttggaccgtggagagcggggatcaaatgtgtgctcttcatcttcgtcctcttcttcttgttcgtcttttgctgacaatttcttgtcctgatctgtattcgcttgctccggtggtggtttctgcgtggactccctcgaccttcgcttcctagccggatcggggaccggggtgtcggcgcagggacatgatatgtatgtatatggaaaaggacgtgacattttgatattgacgtggaggagcgagcgagatgttatgtggtagcttttgaggtgtgtacttgggtcaattcatgactcgtctctgtggggtcgagagcttcgtaatggagtaaacaggttgactggtagcaaattcgtatcttttcgagtaaaaatattttatttccaggatcccgactttgttgcgccaaatcagaccctgagcggagcgtgttggcgcgtgggaacttgttggagcagggggtcacaatggctctgccacgcccaatgtactatgcacaatatagtcaatatgcacaaagtagaaattaaaaataattccaggccaactgtctccaaagcgccaattttcaagaagtccacagtttgcggagagggagctcttccgcatcaacaaccgacgtcagatcccgccattttctgcccgccatcgccgcaaaaccatggacttgcatgcttgaaggtgtagaatcctccatatccattccacagccacaatgatacccctacgaacatttcgtgcaagtctctcaaggcaatgctctgctccaacaactactatccgaaaatatgccagccagacgcctggtaacccaatgcttgaggtcttcaatcgcaaagccaaacacctccaaaaagatcgggcagcccggaatgtcgaacagagtcggaatgtcgactacctgaaagatgaagtagcaatgcggctatgcgagcgcttactggtaagccactcaacgaagcaagcgcggacaatagtgcaaaagtagaaataggacacatcaactgacaagagcttctatcaccatgaataggacatcaaacgtgactttccaaacgttctagatctaggcgcaaacagctgcaacatcgcccgagctctcacatcccccaatatcgactcagccatgccggaaggaaccatcacaccaccactatcaaacaagatctcaaagctcacatgcgtggagacatcgcgcgcactgctctaccgcgacgagaacgaaccgtttaacaaggagatcaacattcagcgggatgtgattccggacttggagacgttgccgtacgcaccgaacagcttcgacgccgtgctatcgtcactctcgatccactggatcaacgacctgcccgcgctcctggaacaggtgaacacaatactgaagcccgatgcgccgttcatcgcggccatgtttggtggtgatacgctgtacgagctgcgcgggtcgctgcagctggctgatatggagcggcgcggcggtgtgagcccgcatgtgtcgcctctggcggatgtcaaggatgtcgggagcttgttgagccgtactgggttcaagatgctcactgttgatgttgaggacattgtggtggagttcccagatacctttgcgctcatgcaagatttgcaggcgatgggcgagggtaacgcaatcatgaaccgtgaatcggcaccgctttcacgggatgtattgttggctaatgaggctatatatcgttccatgtatatggaagaaggtgcgcgtggtatcccggcaacgttccggttgatctacatgattggatggaaggaaggcgagggccagtcgaagccgttgcagcgtggcaccggcgatgtcaacctcaaggacatcctcgagggaggtgactttgataaaccataagcaatggaaacaaaagggcaaatagaaagggcccaatattttgtcacaatatactaatgtaaaaactacgcttaaggcgacacttgagagatatcatctacagacatgtatggaatgcaaatcaagcttctaccaggaagacgagaacaaaaacagtcagaatgtatatcataagaaacgaacctccatccgatgttgtttgctccgctcaaaccgtcctacgatcagtcatgacccgcacaatcgatccagtaccagcaatatccacaagcctctcgtgccagctcagcaaaacgctcatctgctgcccaccgccaccttcacccaagttgcgagcctggatctgcgagaagcccgtatcctgaggcgaaactggcttcttcggcgactgggcaccgctaccgggagcagccgaggacattcccttgtacctgtaatcaataaatcagcaatcaaatccatgactttccctccgacggttcctctcctggcaatcgagatagtagttccacgtacaggtatttcatcaagcaatcagcccgctcagcccctccatccccgctgcacacgccctccaagatgcgtgtcatctcgccctgtcggataccctgcagcacatcgataacggtagcaagatgcacctccttggcacggtcgtcgccgcccagcggcgcggtgtcgaggacagtccgcagagcgccctctgggtcaccgccgcgcagcatctggcgcacctgtgttgcggcattggcggcgtcactggcacttgcgggttgggggagtgtggcggggaggagggattccatggggaagttggccgaggactcggggtccagggcgtcaatgttgatggtgcggtagttgatttgcgacatggtagcggttggggtttggttgagggttgaaacagagtagcgttgggtctcgatcaaattttggctaagccagtcgaatgggtttggtgttgaggaagctttgtggggagctacctgtttccgtttggtatatcggtgcggtgggcggaagcggggagattaggttgaacaatgggaaggcaacaatgtccagataaaaatgtacatgagtataattgtctgtgggagctgatcgctctgagatctaacttctcctatagaatctttacataatcatggcacgtggctaaaatgtgccatttctagttaacaaccccctgggccggtatagtcgcctaaatgtcacgatgcagttgtacggatcatcgtgatgttgactgtttgtcttgtttgcttgccatttgcagagcggccagctataagcagattctaatatattccaatgattattttaatgcatattcaataagcagttcatggagcagttgatgaagtagtcgatgaagtattgataacaaaagggacttaattttgttagtggcttacatacaaattgcaggtacctaatgtcattgcatagggagttcgacacgaaagcggtgtataaagtaaaaggcggtgtgaagagggataggcagaaacagggtagttacccaattaggaatgtgcatctgaaaagtcaggcgggggttaaataaatcttcaatatatattgggagagtgctaagatatgatactaggatactgggtagaattgcatgtatcatatattctaggtacaacccatattggggtacagcatagaattggacccaagacccaaagtgggctgggctgggctgggttgggtcgtgggttgtgccgaagtctagttacttcgtatttaggtaggcttatagaaggaatagttttgggattacgtactaggatctagcgagaaatacgtcttatacttaggggtacgggagcccatgatcgtatttagatactctcgttgaataagatatatagacacatcttctatcaaacccagtgtttttttgtacaaataacacaataaaatatcaaacagccagcccaacgctaataacacaaacgctaaaatgacagctaaggagacgtagtaatcgtgatagggggaatgacgacaggagtaggcgtggccagacgctcaggagagggcttttgcgtgttcagttgtagtctctcaggagcttcttcaggatcagtagactttggtttcaactcgagttcatcttctgacttccgcttgttgaaaatacggcgagtgaaacgcttcacaggcctaaagaaagacctgatgcctcgaccgattaccttgcaccccttggaaagcgggcgcaaaacaacagccataccgccaacaacggcattgaaaacaagcccgaaatagtagtctgggataagtcggagcacgatagcccagggcaagcaggcaatagaacagatcaaacacacgccccagagggtgccgttcaagcgagtcacgttgaatgcctggccgcccacgaagacgatcatgacctggccaccgatcatgatggcgttgattcctaagaaccagtaattgcggaacatgccttcgaagatattgaacttgttgtcgaggcggcgattgttgaattcgttgaagatctgcatccacacgaacgtgttgaacaccacggtcgagagttgtttcgcgcgcatctcgggctcggagctgagatgggcgttgaggagcttttcgcctgcgaaataaagcatgaatgtgatggctagctggtatactgcttggccaagaatcatcttccacatggtcattgtgaaaagggaggcgtgtttggagacaggcttgcggtcgagaatcttttcagtcggggcatccgtggctctgattttccaaaacattagcgagaggtccaggggaaatataagaggaaaaacacgacaacttacaaggcgagagcggcgaatgtgtccatgatcaggttcacccagagcagctgcacagctgtcaaaacactggtgttctcgctgctgtacacagatgacacaaaagtgaggatcacggccgtgatattgaccgtgacctggaattgcaaaaacttggcaacggcgtcattaacagctcgtccccaagcgatcgctgtgatgatggacttgaaattatcatccaggagaataatcgaactcgcctccttcgcgacctcagtaccagcaatacccatggagaagccgacatctgcagtccgcaaagccggtccgtcgttggtaccatcacctgtcacggcgaccgtttcaccgagggccttgagacgttcgaccaagattcgcttgtcttcgggggatgatcgtgccagcacttgcaggcgcggaaccacttcatccatctcctcgtttgtgagttggcggaacttgggaccttccatgaccaatccatcttccgtcttgattccgcaagaagttgcaatagcagtggcagtggcaacgttgtcaccagtcaccatcttgacctggacgcctgccgagtgacatttgcgaatggccgatgggacttcggggcgaagagggtcttggatacctacaactccaacccaagtcatatcatggaagaaatcctcgaagtttgctgaaggatcctcagaatgtttggcttcgatcggtggccagcttgcgaagtccttgtagactatgccaatcgttcgaagagacttgtgggcataattgtcgatgatctccagaaggtttttcttttgttcgtcagaaagctgctccacatcgggtctctctttggaaatatcaatgttgacaatttctgcggtgcagacgccgaccatcaactcggacgctcccttgacaagcagtcggtagccagctccaggaacacggtaaacaacacccatgcacttcctgtcggagtcgaaaggaatcaattgggtgatctcagcggagccacgctccgagacaagatccatgcccatataatccctagccaactgaagcatcgcaacctcggtcttactaccgacaaaatcgatggagccgtccttttcccgttcaaacgcagttgagttcaaagcgatgctcttgataatcaaatctttgatgggagctgatagtttctgggagatggccgaagtagtcattgaaccttccacatcttcatcttcggttctctggctgaagttttggttcgagccccaggttccggccacaacggtcattttgttctgtgtcaatgtgcctgttttatcagagcagatgaccgtggcgtttcccattgtctcgcatgcgcgaaggacgcggactaggttgttctccttgaccatacgggtagtagcgaaggccaaagccagcgttactgctagtgggagaccctctagcgaagaacatggatgtcagcagggctcagatgattgtagacatcagcacttacctggaatagcgacaacaataaccgtgacagcaacaataagaatatccacaaactctttgcctttcacagcaccgttcctttccgggtgattgggcagatcggctacaaagcggaatagcaaaacaaagaacagaataccagcagctctgtctcaccatcagtaacctgtacaacaaaagggaagtatgaaagtcaactcacgctgtacccaaatacccaatccaatccgccaacttacccagcttgacttgaagcggcgttgggtcattaggagtctgcagcgacaacaagatccgtccgtaggtagaatagggtccaacactggtgacaacataagttcccaacccttcaaggaccttgctaccggagatcagaaacgggtcgagtttcttggttgccttgccgtcgacaatttgctgccagacttcatggccaggggtcttcttcatttgatccgactcgccggtggcggaagactcatcgcacttcaccccgtagcctgaaactagaattccatctgctgggatggaatcgcctgcctcgagatggaggatatcgccgaccataatatcgtagattgaaaccatgtcgggtttgcctgagcgggtgacttgaacttgacggtcatcgttctgttggcatgttagctgtgctcagtttctggattgataggggaagacctgcccgtttattgagcttggcaaattgtctctctttttgccaatcgttcgcagctgtaacgattgtaacaatcaagattgctacacagatggcgactccttccacccactggacgcctgtgccttccgacacggtctcgtatatccccagggatagcgagaccacggcggcaatggtcaataatataataattttgtcattatatgcagcccaaaataatttcaggaacccggtcgatttccgagcaggtagtttgttctgactgaagacacgaatgcggtcttcgaatggtgaaccatgaccagatgacaccggcgccggcgccgaggtgacaggttttgatggagatttttctgtagctgtgtgttgcgctgaaggtgccacatcctggaactcgacattgccctccagacacccttcatcaattgacaaaccggccttgagatctgttcgcagaccccgctccagaccttgtaagccaccaagagcatggaatgcagccaaggactttgggttctgcattttgttcagttgacccggggagaacgcaaaccgattatcctccacctggaaatcggcttcattcctcgggtccggtttcaaagcatccgacagcgagacatcgtcgtagacatctttggaagtatgggtcgggtctacctcggagttcgcccgcgaacgaactacggtatctgctgaagaagcgaatgaatccgcccgcggacgcaatgtatcgccatcgatcgactgtgacagtcgatgcgaggcattttgaaccatcagccgagctgggtctggtgggttccacgccatatctggtgagacaggagaagtcgggctgtgatttagatctgtaggacccgaccatgcagaagaggctgtagacatagatcgctggaagagaaagaaaataaaacaatcagcgacaaatttccagatgtttatagaatgatgaaatagcttgagtggcctacctctctgcctgaaaagtccgtcactataacaggactcaatagcgagccctgataggaggggtcattgtttgaagaagacatcgcacggagttgattccgaaaaggatatgcgaattaaatgtaaaagcggctcatgaagatgttcatgtaatacgatctgatatcaagaaatgtctcgtgtgccgccggggttgcgagaccttgttatctcttcccctctcaacggggctgtgtattccaaggatgaatgcccagagacgccgaggttttcgtcaattttccgctggcaattcgcgacgagcgttgtcgagatgccaagtataagagggaatattttattatccacctcagaagattggagcgatccagaaaacgcaaaataatatagactcttgaagtggtgccaggttgtgccacttattaccccgtacggcactgacacagcccccttcggaggttgcaagcggttatcttgatcacggagctccgtgtatgatgtagcggcagtgtcaggttataggggagggcgaagctcataggcatccatacctgaaaagatgaagaatataagcgctgggcttctttcctgtaactatgccacaattcttcatatccatgctacgtgaatggcgaaacgatgggatcagcagccgtcgaatagcgttacgccaagcgcaggtatccaatgcgagggcgttgcgcactcattgtggataggccaacagctgctgcgcctcggagatgacccaatcatttggcacattctcaccccgacatattggcattattgtttggccgtgagcgcaagtaaggaggcaaagacgagtctcttggcgtcatggtgtctgttctaggttgttggagatggggtaggtgtccacttgatgagcggctagactgtgcgcatcatgaatacgcggcgccgctgtcagaacctatcaagcacacgagagaaatgattattatttactttcgcaactcattacctaggtagtaatttgttgaggtttctaggtgaaaggggcggacagggatagctttcgtggagtattgtggcggtgcttaaaatatgtatgtggcgatcgcctcatactgtggctggaggctcatgagctctatgacccgggaggcaagaaataacttggtaagggcagtgcgataggtggcattcataatgggctcacatcaagaaaggggctactccgaggctcttgagtagctaggcagaagcagtacagcccgattttggtctcaggagtcaggacgcgtatgtgcgaattcagttgagcaaagacaatatcctaagcctcatctgacacaaatgctgagcagtacctgcggctgctttcaaatgtatgtcatcaaagttcgaccttcgatttaatgcttgaaattgttttctttggaagtatggctcgtttttgcgacgccgaggaataatctcgttcaactcatcaagcatatggtaatatctaatccaactgcagtagctagtctcagacaacaacaagatggacgtctgacatgtcagatgatgcagtccttgatattggtcttgccacgtggtcagcatgcatcgttggccatacagtggaatccgtgccccaaggcaaggtgttacacttgtgtcagttacatgtagtgaccagtccaagactgattcctcttggcagaagctatctatacgtatggagaatgcgtgacgtttcatgtgcgaagctcgatgactttagattatcttgattatccgagctgatagtgtttaggtcttgattcatacatgtatcatactaagacgaagtaatatatccacaatgatgcaaatgtcagaggtaagtgagaaaataatgaagagaaacgaattcgaacaagaagaaagagaaatagatgaatagaagaagaagaaagaaaataaagatggggggtatcaatagtgaaaaagagaatataacgacaaaatcacaatcaaagacagtagatgcgcttttacagcagcataaagaagtagatcagtaaataataacaataaaaaggtacgatcggggacaagccccggagtccaatgtcacagaaggcctgcgaccccacccatcacttcatttccgtcatttcacatgtcccatatcgcaacattgacagttactgatcaatgacctcagtaaagcgactgcttcgactcccgtcgaaactatgaagactgcggccgagcccatccggccgcggcggcaggaacggcactgcactctggggttgtgcaacggggtgagccggtgtcacagtgatcggagtggaaacgttgaccgtattagagactgggaggtgcggaagtttgggccgtgtcggcggggtgtgttcctcgacctcgcgggtgtagtttgagtccaggggcacgccatatggcgaggttggtggaggagcatagaaggagggtgatccacttggcccggttgctggtgagggagtagggaagcctggtgcagtgggagaatcgccgtctactccgcccccatatccgtctccaccatgtgtgaagacgggaggaagctttctaccggaaatcttttggaacccacgctcgctggagccagagtcgacagtgcttccagagcgcgttgttgccgtcgactggcgccagcgctttatgaatgcgggggcgaggtatctggccgtgaagagcggatcattgctttcgcgccgctcgaccatttctctagacccagcaccggcccctaccccagccgcagccccagccccagccgcagctgctgcgtctcctaacatgttggggcgtcccgctttacccacaagaaatcctcggcggcggaggtagtaaaataaaagaaaaagaatgagagcgagaccggcaactgatcctactacaccacccacaattttaggtgtgtcgggattgcttgtcgaatcctgccctaaagcgtgcgtttcgcttgaagttggcgcggttcctgtgccagttgctgagccggttgacccagagcctccatatacacctgatgaagaggttgtctggcttgtgctggaagccgagctcgtcgaggagccggcgctggaactgaagctggagctggagtcggtgccggagctggagttgatgctggagctggagacggaactagaactggcgctggaactagcgcttgaactggcgctggaaacagagccggaactgaaactgaaactggaagcggaagcggaagcggaagtagaaatgtaaatggaagtggagttggagctggagctgaaagttgagctagagccggagccggaggagcctgaatatgaccaataattgtgcgcctggggtgatgttgtcgtaacagaaggtgtagagctagaagaggtgaggaggcgagtcgaagtccctgtaagcgaactggtgattgtggctgaggcagatgctaatgatgatgtaagttgactcgtgcagtttgtggcggtcaacgatgtttgagtggagttcgagaagcttgaaagcgacgttgcagatagtagttccgatgtcggctgggtaggagcaggcgtcggtgaggttaaccctaaatctatagaggcactcgcactcgcactcgcagtcaaacttggactcgcagtcgtacttgcaatcacgctcacagtcgagctatccgagctcgatagagtgtcagtggcgtaaatagaacccgatatcgtcgtcggaaagtaactagtagtcgaatgaaaaggggtttgtgagctagcatcgactatctgcaatacagtactgatactagtcgggtcgacggaggtcgactcgtcccccnnnnnnnnnnnnnnnnnnnnnnnnnnnnnnnnnnnnnnnnnnnnnnnnnnnnnnnnnnnnnnnnnnnnnnnnnnnnnnnnnnnnnnnnnnnnnnnnnnnnnnnnnnnnnnnnnnnnnnnnnnnnnnnnnnnnnnnnnnnnnnnnnnnnnnnnnnnnnnnnnnnnnnnnnnnnnnnnnnnnnnnnnnnnnnnnnnnnnnnnnngtcgacggaggtcgactcgtcccgcttttcaaatattgagtcggattcgtccatgtcatgctcaagacacatagagtttttcgagtcgcaatcttcatccgcggggatatccgatgcggggatgatgggggtttgaaaggaatcatcctccagtaaatcagagcctgcatcctgtccatgaagctctgcttctaggcggcgcctggcgctaattagattgccgatgcgcgagtgacggaaatgaccatgagacatgttgacagttttccatacacgtcgtcaattgtcaatcacatgcaagtatcaagcaagaccgaagacgtatgatcctcacagaggttgagattcgcagtattgcgaagaacgggaccgataaggtttgagtaaacgaaagaaaaacacgtgctagcgtgcgcaaagttggggtagaaagattgatagatcgtcccgagaaaagaatgacccggctgacagtatgaatgaatggatgttggcaaagcgtagccaagcgatgtgtggatcaacaagaaaagcgcagtatggacagcaggtcaatgatctcgcgatatatggcgcacagttacgtggagggaatggcaatcgaacagacgactaggcggagttagtatgggatggattcaattgaggccccacgccatgtaagcaagccagaccgaagacgaccaacacatacctggagtaaacgagtgacgagaagagtggaataaaaagcaagagcgcagtctcacgtcctaatccattgtgttttggatatctggtgaaaccagagcaatatagagtgtttaatatgccgcgagagtaagcagatgcaaatcgacagctctgaggggcacactggcacgatcttcgtcgagaggaatgaatatacacgaaatggcaagcaaaaaaagacccaaaagtaaaacacacacaacaagaaagagaagcgaaacgggaagatgaaggaaaagacccagactggaccaaacaatcccctatcgaggcctagtctaggcgacccgtgttagtgacgaactaggctcgggggccgacagatcctttcttctttttattttcttcccttgaaattcggggaatagtatctgcaattgacttctgacgatcttttttttttataaaacgaagaaaacaaaccccaagagcagaaaaaaaaacaaaagccaggtcgctctccacgcaggtaccgccaggtaccgcgggagtcgacgaataaaaagtgacgaggccccgatgagcttctgaccaagggcactaggctgttctgggattagcctaccatgcaggtttaattatcatcggcttggccatcgaatggttgtatacataggcaagggacaagggcgacgtgcgtcagtgaagagattatatctttgtataaatgtctcttggtccattcaatctttcgaggaaaaataatgtgccatggtgtacggagtaactacggaggcacacactatatggagcacttacgttgtgctaacggacaatcattcgccgatcccattctccataaacctattttaagcctaggtgtcagaccactccgtgaaaaaatgggatgtatgcatttgactccatatctacgcgctcagctcgtcttatttgacacccgcaatggaaggaagacaagaaagaatagaagggggggtatttagtaacgggctttcctcctcacgggcctagaacacattttttcgcttagaaagtctcgagctcgtcggctggaatctcctctccttcggcagggatctcgaaaccgtcctaatggggggcgcacaggcgtcagttgggggaatcctcagggaataggtcaagggaacggacctcggtcgagtatagaatgccctggatgtgcttaacaagcgtgtcttcttccttttcaagctccgggtcggcttcaatggcgctctggagcagcagctcaatatcgcgtagcttggcgaagtagaagtcgcgctccttctctagtcctgcgatcgcttccttctgtgtggagatctcctgttgcagggcagcggtggccgccnnnnnnnnnnnnnnnnnnnnnnnnnnnnnnnnnnnnnnnnnnnnnnnnnnnnnnnnnnnnnnnnnnnnnnnnnnnnnnnnnnnnnnnnnnnnnnnnnnnnnnnnnnnnnnnnnnnnnnnnnnnnnnnnnnnnnnnnnnnnnnnnnnnnnnnnnnnnnnnnnnnnnnnnnnnnnnnnnnnnnnnnnnnnnnnnnnnnnnnnnnnnnnnnnnnnnnnnnnnnnnnnnnnnnnnnnnnnnnnnnnnnnnnnnnnnnnnnnnnnnnnnnnnnnnnnnnnnnnnnnnnnnnnnnnnnnnnnnnnnnnnnnnnnnnnnnnnnnnnnnnnnnnnnnnnnnnnnnnnnnnnnnnnnnnnnnnnnnnnnnnnnnnnnnnnnnnnnnnnnnnnnnnnnnnnnnnnnnnnnnnnnnnnnnnnnnnnnnnnnnnnnnnnnnnnnnnnnnnnnnnnnnnnnnnnnnnnnnnnnnnnnnnnnnnnnnnnnnnnnnnnnnnnnnnnnnnnnnnnnnnnnnnnnnnnnnnnnnnnnnnnnnnnnnnnnnnnnnnnnnnnnnnnnnnnnnnnnnnnnnnnnnnnnnnnnnnnnnnnnnnnnnnnnnnnnnnnnnnnnnnnnnnnnnnnnnnnnnnnnnnnnnnnnnnnnnnnnnngcccctccactgggcgcggccactcggggacggacggcgcccgttgttggggtcaccccacggcgtgcgctgcttgcagacggggcgcgcgaagcgggggcggcaccaacggcgccggaagccttacgccggccgacggagtcgtattcaccaccgggatagtgctggtcccagtatttcttaacccactggaggaactccaggttgtcctgcatgcggcacttcgtgagggactgaacgggaatgggcttgttgacctggtgtcgggcgaagacgtctggatgattggatatgttaaaagggggatcgttggccgatttggaatccgccttcacatactctgaagaatcttgaaattctgaaggtaggcatattcagtgttcacgttgaatttgacccgggacatgggaacatccactgaacaaagagagaaaccagtcagtatgtatcccgcaactcagtacgggcccgtttctctcgactattgcgccggtcgtattgattacatactgaaaatcgaatcgaagacctggcagagggcagcactatagaggaagataggaggtcagcccagctgatccatacaaaagagatcgccccgcgggccttttgaaagtcggggagaatctcgatcaaaccatacccagttccacattgctcaatcttggtaaggttcagctgcagcaggttattaagccatgcgagcagttcctgtctgaatcataaagcgatcggcgtcagtaaggccatatcggtcgcgagatggcggggaataggagaaaagtcgaacctggattcacccatgatggtggggtagaataataatcaatcgaaacactagaggagaaaataagactgggataagcgctaagcgggaaaagagctggatgaagatatgacacgcgagaccaggacttcttgtcagtctacgctcgtgtggttgatgggaaacagcggagggattgttttgatgctaaatcccacggatcacactggcgctagcccactttttctggcgaatcatagctggattagttaagcacttactgatgcctgaggtgtctacttgtacctgagctctcacatcgtagcctaagatattacctcggtgcatgaaactattatatcgtcaagtgaggcacaactccattacaacaggtcaaatttcatatatcgtatcacccaccatgctgtcgctcagtgtatcgagttatcacctctacttaaccactgaccgccctttctaccgtcttccccgccgccatatttgaccggcagaaacggtcgatctattgatcttgtagctgccttgtcgcctcaggcgggtagccgcctcttttgactttctgtcaaatctttaaacagaaccttggaatgtgtacagcttcataatatttctcgtactccgtagcatgtgtgatgtcttccacgagtgacagcgacccactacaatttaaccgataaattaagaataaagcgaatatacaatgagtccgagtatacgaataataactgtaataatggttcgatatatatagatgattgagtggtatactaaatatataattttgcaccagttcatatgcgtataacaaagaacaagaattcattctgccaatattccaggccctgatccaatttgtatccaagacggaaaacctcatatccaactcccataatcctagcaatgtataatgataatgacaatgacaatgaccaaacaaacccacaaagggaaagaagcagcgctgaaaagggggcatgcggtatataaacaaatgcaaatagatcactcctctaacaggtcgatcccgtctatgccatatccaaagtccataatgacagcccgggagtcctggctcgtcgcaacaatgcgtctataatcggactgtacgctcaacatccagcttgtagtccagccagggaagtcgatggacatattacccgtatcacggtcgaacaccttgacgctcatgtcatagctaccgctaatgatgcgcttattggcgctgtcgagatgcagagatcgaatgagacctgaatgcccgtgcagctcattgacgagctcgcccgtgttagcatcgaattgatagattatgcggtcgttgccgccagtgaggatggtccggccatcgtcactgaattcgacacacgcgaggccacggtctttgctggtgaactccttgacacattggcctgagatcacgttccacatcttggcaacaccgtcaccgctggctgacacgataaggtcaccgcggagctgcacagcattcactggtccttcgtgaccgttgagttgcctcaaaagcgcaccggtgtttcgatcccagacacagatggtagtatccttggagcatgatacgatgtaccggtcatcaaagcacacatcaagcacaccggcttgatgaccggaaagacgacgaattggtcggtagtcgtccttgacgtcatacatgatacaggtaaagtcagaagaccctgtgaccatgatctcttcgtcaaactgcaggcacaggattgatgcgctgtggtatatcgattctttctctaatggtgttgtaattgccgctatttcgtccggcgtgggccacggcggggtaatagtcataaagggggcctttcccgtggcctggaaagttggattgttcactggaccatcacggaaagttcgagccgctggtggcccaataatcttcttgcatgaccacggatagtgcgcgtcccatacacgaactgtccggtcacgggagccagtaatgattttgttcctataaacttgtcagcagtgcacggcatcaacataataacgttaacttactcgtcaaattgggaacaataaacgctgtcctcgtgaccttgaagataaatggctgcagccttgccatccttccagcgctgatcgagagcgcgccgaacaaggaacttcttcttccagtcctgattcgggattgacttccctaatccagatgacagcttcaccttggaggccgtctcacttaatggccgacggccatatgcattgcggaatacatgcctccaaacatgggaagaggatgcacgacaccaggcgcgggagacgagctctgcgtccatgagggaatcaggatccaaatatgaaaaaatgtgtgatgtaatctcagccggaagtagagccacgggatctgagaaaaaaaaagagaagttaacaaaacatgcgcgttgcccatcagagtgttcatccttaccgagtcgcgtcatggccagcaactcgctgtctgacgtatccgatcgatcgcccaagtcaatacaaataccgctctccgagtcctggggaactctcaaatcaagcattttgttctctaattccgcttttcgcgcagcctccatctgctcattttgagctgcggctgcggcacgcgccgctgcacctgcagacatgtgattcggcagaactggaggtgcctgcccacggcccgggatgggggcagggatagaggcagtgggtgcatagaaactgtgcagggcagacacactattcaaagaagggcgtctattgacgctatatccctggtgccaaagtgtttttgttgaccggagatcccagctaccggaagccatgcgcttgtgattcgcatggttcgaactatggtggtagtaacggttttcatcgttatcaaccaatttagtgtcctcggtgagaggagttgtttgcttggaaggcttgcgaagactgacggacaggcgatggccgagagcgaccaaaccatccacaggatgcttcaaactcgaaaagctcttggcgccacggcgtcgcggagccacgttcgggaacgggtctatctcttccacgaccgatgtgtggtcatcctggcagatttccgtcaagcgtggctcatcccatgtgtccaaagtcatctcctttgacgtcgggatagcatgacctgcagtgcgtgggcgcgaacgaaacgacaacgaagagcgtcgctttgcggaggtggcgttggtctctcgtggcgacatgactgaggttgttggtgtgccgagggcgaattaaacaggaattggatgaatatgaacgcaatatatgacggcggatgttaagacaaagaatgtcgacgcttttgtctattttatcgggtatcgaccgatgtgatgcttggtcttggggggtttctgtgagataagtctaacaaagtatgtatatcaacgaccattcgcaaaactccaaggacccaagagaatgaaaaagagagattaatgaatgaactatacagagacaaacaataggaaaaaaagacgacgcaaggagaagataaaaagggcggaagaattccagaaagcagaacggatgggcctgggtcaggcggtgaatgaattagggagtgattggttcgaccaccgagttctcctaagagtcgctagtactgggattcaaagtatggttggctataaggattaagtaccgaataccttgagagtactcgcccctgcaaggctcagacttttttaggagtcgggaggcaaatcctggggggaaaacagccggacggaaaatgcggagtaactgtgacttggatcgccacgataaatctactgcggatccaagtaccgactacactctcacggtggcaattattaggctttcgaaggaaaatccgagacaatgatgatgacaggctctgataggccgatattggaagaacaattgacttcaatctattcagataaacacccctaaaccccctaacccccccagccctctacctcctcctggattttgtatgttgacaccgactatatacataattcttaatactaaacatcatatctcctttatccaaagatcttctcatatccggtcaaagtgaaccgatagtgaacatcacccttcttcatgcgcagcatggcctccttgagtccttcctctccaatggggatctcttccacccaacccttaagacccttatccgcagccagctgcaacatctcaagcatctcccgacggctacccaggtggctggcaccaatgagaacaccgttagagattaggttctgggccttaatgacctgaccctcctcctcaggaagaccaacactgatccagcgcccatgaacatccatcatagacagatagcgcgcaagatcgaagccctccgaggagttagcgcagttgataatcaaatcaaacgagtacaggtgatccttctcccatccctcctccgcagtagcaatgtaaccgtcagcaccgagcttgcgagcgtccgcttccttggcgcgagagcgcgaaatagcccacgtctccgcacccagcgccttggcaaacatgactccgaagtgaccgatgccacccaatccaacaattccaaccttcttgccaggcccagcaccgttgcgcaccaagggcgagtacgccgtcaaaccggcgcacagcatcggagccactttgttagtctccagtgcgtccgggatcgggaacacccagtgctcgtgtgtccgcacgtgcgatgagtatccgccctggctaacgacgccactgtcggcccacttcgaaccgtaggtgtccataggctcaacctggcagtatgtctcgttgtcgttgaggcactgcttgcacttgccgcaagagtaggactgcgcgccgactccaacgcgctcaccttccttaatcagagtgaccttgggtccgacacggattgcgcgaccgacgatttctaggatggttattagcacgagacagtagccctttttttgctttttgaatacgtaccgtgacccacgcacagagggaacttttgttcaccccatcctcctataggaatacattagtcggtatttctgcttggtattccaacgggattaccataccgctgatagtgtgcacatcacttccacatatgccacaggcctcaatcttaatgtcgacgtctatactcggttagaagcaagcataatggtaccgacagcctaactcaccatagtcgccgaaaggcttcagcttgaactattcagcgtaataaatccagataagcgtatatcctaaccagaacacagaaaagagcacatacgtagcgcttgtggaactgggtgaagctgttaggtccatcgacctggaagccctcagcttcttcggggtaaggcattgtgataagaatgagtgattggtctgaagaatagaacacggaccaaaaagtaagaaaagtaaaatagaaacaagaagacaagcggggtgagggggatgtatatctacaagcggggatcgcacaacgtgccctattcatcccacgcgggatatgctacgtattgttacaatctagctgcttctctccagtcggacaatgtcccgtggacccgctccgagaaaattgacaacggagaagattcagagtgatcggagcggaggactcggaggtggctgtcgcccgagaggccaacacgctaaacagaacggaggtggtccgggcagcgtggggtggttgttctatttagtggggtaagatccgctacgtagccgataacgttaataccaagtggtttttccacctatgagcatgccaggagaaattatatgccggtttggccttatcgataaggggtgatatagggctttggcttagggcttgggccttttacatgggtttggtctgtcaggggcaagtatgtagatctgcaagacttcttcatttggtaaagcctacattatagtttgcagaggggtgtggcactcaatcagccctagcaaagtcgacgtagacagagaatttccccaaataaagatcggatgccctcagatagccatataaatgagcctttcaaagctatactgggacagcggagctaaatgatggtttccatatagctataatttcgtgttcttagagctgagcgatactggtgcgataatggtcaagaggccacgcccaacgaagcagtgagtgcatcatatcgtagtacttcttcttgtcaatctgacccatgtaagaatccaaggtgaatgatttgacctcggtgaattctttaaaattcaagaccggggtaaattgaacctgaaatctaccatcaaagtaggcgtatagtacacgggcgcagcatctttggtcaaacactatgatcatggtctatatcgctcgcaatatatcagtatgaaattctttcggcacaaggcatggggttaggaaggacctgaacgtaccgggaaaacttcactgaatctatgaacaccctttgactcaagtgcgttgacgagcgattccaattcacggaacatgcctctcaaaccccagctaattaaggctatgagctcagcagccgaggggcgatcgtaaccgcacgaggttacatccaccagagcccatgcatgcgacttgtatgggtgatctatctccattgatcttgtgatattgattccgtgtattttgtctgggagatcgaggccgtatagtctttggaacctggataaaattgatcagcctgaataatacaaatgtcacatcccccaatatcaatgtatcactcaccagtagactgaccagtcatctgtctcgtaattgaggatatccaggtcgaaagtattcgcaatcaccatctcatgatcattatctgcctccttctcgcttttatcgtgactttcatcacttggtttgcgattctcgtcaccgctctcttcactcttgtcgccatcttgctcactctcatcatattttttgtagttcatactttccccttcttttgccttgtcactgtgtatttcctcgatatcgctttccttcctatgatccgattcgtcctttccatcgctcaccttgtcgcctccagtgctatcaaggtgccccgactcatgaacagtaggatcatcataattatcttcttcttcgcctccatccagctcgtatggccacaattccggaatgctgcagtcctgatagtccatgaaaacacgtcgaagtagatagtctgcacggtaagtccctttgccgtagttgcctttttgagatagaaaccagtcccagcttggatctgcacatatcttctctatcctaggtgtacctcttcgtggcatgaaataatgcgtaaccgaaggcgaagttatcccagaagcaatgtctagatgattgagatcaattcgcagaagctgtagattccgctgggggatggaggaggttgttactttcttcatggagacaagcatttgttcaagtctttcccatctcaggaaaaagcaccaaaattggggggttgtatttacaggggtatcgcccattttggtagtttgtccgaggcagagatgttgaacaataaggatatatggcaggatcatgaggagaaacctggtgctagtaattataataagtagattgtatgtttacctaggatcatatctagttggttgagaagaacaacttatataggattgtaagactgatttaatgtactaagccccaaccaaaagctcgtccgtttccttaaataccaggctgaactgtcccagtggacgtactccgccgtggaattaagagtaaagtatattttcatgaactatgccagtttgggaaatcagataaacttgaatgatgcagggctttgtaatgtcgaagcgcctcaggccacgataactatttgcctctacaatataagcaaccaacgttggaaaatatggcaacaaaagagatgtcatgaaacttgatatatgcattggaattattttactagactttagatgaagctccttgcgatttcccaagattatgccacatcgggcaagctcaattcaacatccatagcaggcttgatcttatcggcaacagcctggtactgggcatcagtaagacggctgagaggtcggcgagggaacccgccgtaaccgtagtatgactggatagcacccttggtaccaggaatagcagcctttgtgagaacccagtcggcagcactgagttgctgctgggcctcgatggcctctgtgagacggccctcggaccaaagagtgaagatgcggacacacaggcggggaaggacgttcgcgccaccggcaagaatggcagagccgccagagacgagggtctgcagactgaaatcggcgataccgccgaaggcaacgtatgggtgcttggcgtttggcttggagactgttgcggtacgctgggccggagccaagggggagggaggggtgatggcgccgagagcggtagcgacacgagtcagcttgccggtattggcacaggtgaacttggtgccgacgatgttagggtgttcggagatacggatgatgaggtcggagtccatgtcaatgccagcgacggcaccggggtagttgtacaggataataggaacaggggagccgtcagcaacagctgtgaagtattcgtacagagtttcatcattgccgactgcggtgcggtagtagctaggaggcacgatcagaacgtactcgccgccagactccgcaacctccttgcacaggtcgatggttccgcggatgctgttctcgctggcgccggcgatgacgggcacgttggtgaaaccagcttcatcgagagcagaccgggtctcccgattgacggtcttgcgctcttcgcggctgagatgcacagcctcaccgtttgagcccatggtgaccaggccgactaggccaaccttggctagacgaacagcgtgacggcgaatagaggggatatcgagatcttcggtctgggcatcgaagaaggtcattgtcggcgcgtaaacgccggggcggagtggggtgggagacatgattctgagattattggattttggttgatgttgatgttgttgatattagagaaatgacctaactgatctacttgggacttgaggggtatatagcaatgaaaacatcattggccttcgggtcatacttctcttcccccacgtccggcaaatgccccgaggtacattgtatggtggagaatcaaattccaccaatcagcacaagcacacagaatgtgggggacaggaggggtaaaagcgacgggtaaagatggctaaagacgcacttcagccggcgttgaaaaggccattagtctagcgggtgataaatcgcttgagttcttgagtcgtacgtataatagtctatatgcgcatggaaatccctatgtcttgaaaggaaaaatgagcttgaaaagtgatcaactggcgtcaaagccatggtggatgacgatacggctattgaatttaccccagggctatttcaaatgccggaagaattatatccagcgatttaataccccggcttcctgtaaattagtttaaaatttcctcttccccttagaaattccccggaattcaatcaccatttcggaattaacagacatcatggctcctcctagcgttttgatggtacggacaatggttccccgcagtagatcctcaagctaactgagctcgcaggtcggtactggtgaatacaccaccggtttcgtcggcggtggtgcatctggctcagacaagaaggtcggtgtagtaggccttagtctatttgacctgcgtcggcggggtaaggtgggcgacttgagcatggtgggcgtgtcgggcaagaagttccctggtatccgtaagttgagcgaaagaacaagcaattaaacaggaagctaatcgcgagaataggtgaccacttgcaccgtaatatctctcaagtctacaacaacctcgatacctcgttcgcttcgttccccgcggacgaccagaccgaccccgacgcatacaagaccgccattgatgccctccccaaaggatccgccatcaccatcttcacccccgactctacccactatcctattgcgctgtacgcaattgagcgcggccaccatgtgctcatcaccaagccagcaacccagcggctagaagaccacctcgctctggtcgaggtcgcgcgcaagaatggcgtcttcgtcttcgttgagcaccacaagcgctttgaccctgcatactctgatgcgcgggctaaggcaaagactctgggtgacttcaactacttccatagttacatgagccagcctaagagccagctcgagacctttaaagcgtgggctggtcgtgattctgatatttcctactacctgaactctcaccacattgatatctgtgagagcatggttccagattacaagcctgtgcgggtctcagcaactgcatctcagggtaccgctgccgcgcttggatgtgtccccgagactgaggataccatcactctccttgtggagtggcgccgccgtgataacccggcgaagattgccactggtgtctatactgctagctggacggcacctcaaaatgcgggcgttcactcgaaccagtacttccactgtatgtgattctattttccggcagtaaacagacatcttctaacattggaacagatatggctgccaacggcgagatccgcattaaccaggccaagcgtggctatgaagtgaccagcgacgaccagggtctaattcattacaacccgtaagacccccattctcatggtaatgctgtaacatggttctatgctgactattatctagattctatatgcgctacgctcccgacgaagaaggaaacttcagtgggcagacgggatacggctacatcagcttcgagaaattcatcgatgccgtcacagctgtgaacgagggccgtgtgaccctcgaccaactggacgcccgcccgctgcccactctgcgtaatacaatcgccacaacggcaatcctcgatgcaggacgcaagtcactggatgagaggcggcctgtggagattgtctccgagggcgataagtgggaactgaagtaaagagtaaacacgatgtaaatggatttaaattataccaaccagtgtattattttggaatgaccgtatataatacatttagtgctgattctgtcatgcgcaatgtcttaccttgagtcgactaggccgcaactttaaaaatagtaagctgatggaatacgagtgcgactccaattcagccttgtacttttagaattatcatcccccctcggcgattttttgtatatatcagactaaatcattcagaatgatgcgccgaaaagaggtttataccaatatcacgcccatcccctcgtctgtgccccgccaactagccctcgacatcctacacagccatagcgaaatcatcacactaaatccactcgtcctctcacatcaacccatcagggctccacgcaatgccgtcgccgacgagtactactcgacgtggtacgagatcacagaacgagtgcaatacgtcccggggctgggcaagataggatcgggcaagatcagcttcaaaggctgtttccacaatgtcgcatggggtctacagacgcacatgtacgcgccgatgggaatcgacctccgaagcaaatggcgcattggaggcaaccagcgcgacgaaccaccggaaccgcaagacaagcgcgcagacggcgccccgcaaaccggactctatctgcgcgaggatatcgagatcgaatgcaaccgcacgctgatttctttcgtcaagggtcagttgaaggtcgcttcgaaggtgctggtagatcgcctgattaagaaagccgagcttcttgatgctggtgtcttgcaggctatgatggaggatggcaaattgacgacatataatccggccgaccgatcgagcagaattgggagggagctgtcgctttcgtcgcgaagacagtcagatcaaatgtcgaggtcctcgtcgtctcggggaccgcgatcgccgacggattcgcagttggggccgatgtctcctggatatgcctttccgccgcagtacggacaccagcacagtagaagctttgctgtggaattaccaggggattcttatcatccacaacctgcacctggtgcacatcaagagttgccggataccagtcgatatccgaaatcatcacggctggataaggcgcataatgaactatctgttatggaagaggctccagagcgtgaagatgggttactttacagcccttacaaaccaaagggttagttggttttaattttttatgtcagaagcagacacaactgctatgcattatgtattctttaagcttaatacgaacacgtccattcttcaagttgtctactgtatatcccgacatcgttcgatgagatcctgaatcctaaactattaccttcatattatcctaccgatgcgtgacaataattctatcgttcggttccagtgagtttcgacgaactgcttcgggcatgatctgtgccaatgatgcttccaatgcttccaaatttatgaacatctgatttttgaaagagaaagctagaaatccaagaaacggcgctactccgcacacaaataagaaaaaaacaaaacaagacagctcgtggtatcatgcgagaagaatcattcaaatccaattaacggcgggatccacccttgataatgccatcttcacccttgtggagcttgatacggcactgggggcagtaccatttggccgtgcgagaggggacttcggtcaggcccacgcagctgagatggaaccattcacggtcacactgcaacgaatagaatatcagcattctgctagaacatatcataatagggatagcttacatcttggttctcacagcagatcatcgtcccaaaactaacatctccacagagacagtatcggggctcattggcatcgatctgttcgaggacgccgtcttcgtctacacggacatcctgggagtcgcggatgctgaggcgcttctttccgggcttggctttgcggcgtccgtagcttactgccgcgccgccgtcttgaccagtggaaatgggacctggtgccggacgcttgcgccggcgggcagggccgggaacacttggcgcatgtgacggctcgcggatgggtggtttgtgcgcaggtgttgcgcttttgatacggcgatcgcgtccacttactgctattgcggtcaggacgctactgagagttcctccttcgattgaggcggcggctacagagcgccgcgatgagggccgggtcacgggtggtgtaggtgtggtgacaacttggacaagtgatgggttgggtccggagcctgcggggctggggagaggaggggagaacgtggcttcaagtgcgggggacgtgtgggtcttgattgggagggtgaggtcgctgttggtttcagcggctggaacggcccctctgctagatctgcgtcgagatggaccagtcctagaagaaagaacagcgacaggggcaggcggtgcgaccggggcagcaacttgcgtcggttttggaggctcgggggcaacaagttctgttgcttcagggataacctcttcgcgtttcctcttccgtgatgatcgattcgcggctgggggagcttgggcggggcttggcaaaggtttgaccgagacaccaccttcaccttccatcaatgcttgttcacgggccaactgttcgcgttttaatttctttgcttcgtttaatttcattccgcgattgctcagcttcgtctcctccaaatctttggccgcctcgccacgccgcgtttcctcaatgttatcacagtcaatgaactctccgcccgtctcttctgccagggccttcgctgcacggtatgcttcccagcctcggttcgccagggccagctcacggtgaatcattacttcactcggctgccagacagcattctttttcatcttcttccgcagcctggtcatctcccattccgtcaatcgcagccatggcaggtcctcactgcccaatttcgcatcagctggtggtggtttcaacagcgcaagggcctgtgctgttgactgtgcggtacccaggctcgggcgacgtgctttttccttctttgggggtcgcgcgggcttgggagcagatttaatgagttcgccctccaagtccgattgctcggtactggcaagcggagaatctggatcaaaggccccatcggcacctagaagacgcttcctgtttttatctctccgattgcgattgttatccaaccgcagggtgatacgcgtcgtggcatccttgatggctttcttgcctccgcgcgcacgcttcgataaaggttcgggcaacggcgacggttcctctgtggcaggtttcggcagtgcttcgagtttctggcggatgcagcctaatcggtcgaaatggcgatctacaacatcgtagaggcgacaggcctcggcatatgccgattcacgcgcatttatggcacgatcgagctgagaggatatatctttgcgcagtgcaattgcgcccggtcgggtatccgaaggaaggtctggaagctggccgtagatatgagtgagctcgtgcaccgcttgcgccgagtcgagatatcggtcatcgagcccgcggatgagggttaaggagcggattaagtctgcggggaggtattcagtgtaatcaataaagtctgtgactgtggcctgcgcgtcagggtcgaaggggccgtctaggatgacccctccgctatcgtctgtgtcgtctgtcatgggcattttctagcacgatagtagttgatgttagaatgtgtcaaattaggcgcgttctgcgatgataagtgaggacatcgaggggtctagacgtcagataacagatggagctgaatgccttactgcacgaggtcctacaacagcggatgatagttattccaatgcagctcttggtcacgtgaatatatccatagcccagatataccgatttggagcccgcatgtaacgaatatgtactcggtttttaccatagagttagtgcttcacttatccaatatagtaataacgaaattgcccttactccgagctccattaataccttcttatataaaatcgatcatgtcaaagctgagtcagtcggttttgaccaattaaaatggcctatgaagccccacctctccgaatatcgacactttaatgatacctatactccgtactaagaggtctatatggaggatagacgagggaaaagccacggaagtcaagtagtattaaagctgtttcgggttgtacaattgtaaagctctatacatctatccaaattgtatatagatgggcacctcagtgtagaatgcgctacatgtacacatagtctgttctatatagtttactgtctttattgaaagctatctcatatctatactcagccttggtctctttaatcaagagttgattcaatttcatctgacttttcaaagtcagactaaagtgctaagtgtttgctaatgtaggtaggatattgattgccaatcactaggcagtatcacctgcatgtataatattgttataacgtgacggcctgttagagaaaagagagaaaagagagaaaagaaagagaagaaagagagcaaacagagagatatagtgatctctttatgtactttactatgagctacatcgttctttcccagttgaaatcgtccctatcgtcccttcccaatccgatcgttccttcctaattaacaattctgatcccaaaggctcgccgtgcgcatcctggcgcgtttgtttatattttatattttcttatcctacttcctcctctcctcttcaccctacactcctcaatcttgccaaagcttttatctcagtcttccaaaatggatgttcgcgagcgtctgaagatgcttctcgaaggagacacgggtctcaatgacttgaatacccacttgagccaggctgaagccgtccaacctgcccccagtgcggatggagctgatccaggtgctgggtttaccaaagctaagcaagatgtaagtcaatcttaccctgagggtggccaatttcctttgtcgtacattcgtacctatgtggttggagacataggtgggtcgagagacaggccgttgacccagatcaaccagcgtcatccccgtcgtactccgaagatgcacattgatatcccgggcttgaacaagcgcaaagacgagggtggcggcggtatttctgacttggattgcgacgaggagttggtcactgcaatcccggtgaccaagtcgttcactccggccaccacaatggctcgcttccctttcaggtatatccctcagaatgatgcccagagcgtcaatgagcggttctatgagggggatcaattctggaatcgaacttgggatctgtttgtgaaatctaaaatcagttagcaaagtatcttgtcgctaatcctcacctaggtatcatctgtctgtcccaatggctatttctcaaaccccatttcttttgattcccacttcccaagctcaagcactgctcgatgaaatcaattcggctctgaacctcaatttgtctctcacgggcgttgacaaggatggcctcgtgattgacatcgacaatgagatgctcccgcagcctatgtaccttggccgaaccagcacccatgctcggaagaagaaattggagagtattgttccctcgcctctggagaactggggaccccacgcacatctggttgagccccccgttttcgaggattttgaaaagaaaatcaaacaatccatcgccacaaccaagatcaggaagagctgcaagcaggcggtccgggatgcccgaatcaagaagtggcaggagagcttgggtcgtgcgcaagcctactttgggctgtgccccccactgaagccaaatgatacacaaccgtcgtttgccaatggtcagatcagaccgatcgatgttctgaaacctgtcaattgggcctttcaagatgcccccattttcatctgtattgaccttgagtggatggaccgctatggctctctgactgaggttggaatttcgactctggacatgatggatttggaaggtgtcgtccctggtgattatggccatatgtgggtgaagaagattcgatcccgtcatctgcgtgtgaaggagcaccggcactgggttaacgtgacttacattaccggatgtcctggtagatttggatttggggagagtgagatagttcccagcgctgaaattccgaaggttgtggacgctgcgttccagcccccatacatggtttccttggagggagaagatatcccccgacacaagaacgcgaagcgcaatgtgatcttggtcggactcgatctccacggtgatatcatacatctccagaaagcgggaagccaagtttttaccagtctgaacgaaccctcttcggtcatccgtgagaccatcgacgtggcagagctgtaccgtgctgatgctgaagagaaccaaaagcggggccttcgagcactgctgggatcactgaatatcttgagtttcgacctgcacaatgccggaaatgatgcccactacaccttgcacgctcttgtgcgattgatgctgagagtcgccggggagaagccgtgggcatacgagctcaacggtgagcgcaatgttgagagcaaggatgagcgcaaggatcagcaaggcgaccccgagtctgaacccaaggctgcagtgtaacgacaacattgatggagacccgttcaccgtcaactcacgaaagtgggagtgactgaggggctggagccatgaggtcaagtttgagaatctttaaacatacctcgtgggatgctcttgagaaggtgaatgggcgcagtgaattacaacagaatgcgtgagatcaaaaatgggtgaaaataaaaaaacaaaggggatgtatggctagttctagctttctatggtctgagctgaatgaaaatctccgctgattttatgtcaaagctttctcgtgctaagtagtccataccgtataaatgtactgtatactacgaaggtgtatagtataccgtaaaaagcaaatgatataactccgatgttatgtcctactgacgacacaccatgttcatcccactatcgccccatcccacacaatcttaatctccgatctccccctccaacaaacacaaacaccgaccatctcaaccaatatatatttccccccaaaatccagaaaatgaccagtcgaggcccctttaccgcttacctgctcggaagcaaccccaatgcactcaagcgcgcaacaacccaccgcttcctcgcctccgcaggccgcggcaccctccccaagtcgcaactaagccaatggctctcccaagaccgactctacgcgcaagcctacatccggtacatagggctcctcctctcaaagatccgcctcccaacccaggacccgaaatcaccgaccacacacaccccaaccccggaacaaagcgccataaccgtactcatcgacgcgctcgtcaacatccgcaccgagctagccttcttcgagaaaaccgccaacgactacaacctcgatctaacagccatctctgccgaagagggcggctgctcgctcacctcctgcggccaaggctcggacatcaccgtctcggccggcatctgctccatcggctctggaagctgtccggggatcacgggcggcgacgaggaaggcccgccagcggacggggagggaaatgcgggcggcgagcagagcggcgcgcccggacacggcctgtgtcagagccagggagagtgccagatgccgtctggtggggggctttgtgtgcccggaccgcagttcagtgagtatgggcgcgatatcgacccttctccttcgggcggggaggggtgtgggactcttttcttctgcgcgagtcgcaccaccaggggttacattgatatgttcatgtcggcggggagtagtggggtttcgatcttggaggggatggcggtgttgtgggctacggaggtttgttatcttcggtcttggaggtttgcggcggagtgtatgcgggaggatcggaatacagattataagaaagatgcggatgggggtgcattgagggagaagtttattgggaattggtcgagtgctgagtttgaggagtttgttaatcggattggggacgtggttgatgagatggcggggcagattaagggggcggaggagttggagattatgcggggaaggtgtttggagtggtggaggcagattgtttggttggaggagaacttttggccaaatgctgctaaatgatgtagagttatctgatcaactctagatcgacttgaaatgtcactatctctagggttgtgcacatgctgtcgcggttgaaaaatattgtatgtagaatatcatacatctgacttgaatcccatgtgcacaaggctatctagaacgggatgacgagcaaaagcaaagacaaaaacaataacgccgtccacagaccgaggcaaaatcaaatcaaaactccgaaccggtctctgctctcaaaccaatgacaatgtcatcgagcagaccgtcaaaacacaagtataaaaatgacaaaatccaccaacaccattcgtaatgcgaaagcatgaagcatgaagcaagtagtaaaacacatggacacagtctggaaagtggacatgttgtacatcacagaataagacagtctgcaccaaccatcgtaggcaacatcacgtagcagccgcacgggcagcattgcctagttgtcgatggtatgagccgataggttcgaaacctctgaaaatagtattagtttctgcgtgccgaccgagtgtataaaagaaaacctacctagcaagatcaaaccccgatccattatcatcatcatcctcctcttctcgctcttcattcctcgcatgagacgtcccgttgggtcccatatcccccgaatctgactggagcgggggcagagtccgaccggagccaagtccattcgacgtcccgggtttactaggactaacgagattcggcggcgggggagagctactcgggaacccgccgataatgcggtcctcgacctcacccttcaggggactcatgtccggcggcggacgggcaggggtactcccgatatcagcgaacttccagaactgcgcgggcgagctcatgggcatgaacttcgacgggatctgcgcggtactggggggcgggagacggggctgttgccgttgcggggcgggagtaatcatcgaagagggctcttcgttgtagtaggatgaggagaggactggcggggacccggctacgttgtcggacatgccgtacgcgcgggctaggttgttgctgctattttgaacctgcgtggagatgctggagtggtgattgtgtgagcgcgacgggagcggcgagggttcatcgtagtcgcgtgggttcatatgtcgcagtgggtggtcggagccgagccctcgaccgagccgggaaccacgctctggtgtgtatgcttccaccggggctacgggaaacgagctgaagcccggggacgaaacgggtggcgactttctcgctgttgctgagaacgaggtgtcgattttgctaacgtgagtcccgcgtgctgatgacgggggctctttcgtcgccggcgaggacggggcagatgactgcgtgccgcccttgcgtgtttgcttcttccggtactcctcccgatactctactgcgatctgccacttcatacccttgcccggctcgtcggtccggcggggaaccttttgaaacgccttgtttagcgagagattgtggcggatggagttttgccagccgctttgggagtgtcgatagaacgcgtatttatccataatccaattgtagatactgttcaacgtgagcttctcctcctcactcgagaaaatagcctgagcgattagagtcgcatagctgtacggcggcttcaggtccttggaggaatccttgctgtaatcgatttcctccgtgctctccatcatcatgcctcggttgtaaagcggggactgcttagccgtgcgctggccggcggtatcgggcgatcgcggtgggggcgtcacctggcgcttgttgaacttcggagcaggcgccaacgagggcccgccggacgaagatggtcgtgtagcctcgctgttctgggaatgctgaggatgggcatgctgcgaagcatcccaggcaaccgaagccggatccggctcctgtccgctcgcaatgcgctgcgcacgctcgataaagctgggctggatattggcctcgtcgccgggcgtgacaaacatcatttgtgtattggccacctcgatgatgtcgccacatgagagaatcgcatcggtgccgcgcttcacaattgcattgttcaagcgcacaccattccggccattgacccggatgtgccaggcaggggtttcctcgccatcataaaagatctcagcatgcagtctcgacacgaatttgctagggcccaagtcgacatgaacatctggcagcgcacgagccgctattgtgacggggctagactgttccacagcccgctgttcgcggtccggttcacggccgatattgacatgcagtgttttgacgtaatacgtccaattgcggccggcaatcttagcatacgcctggatgcgctgtgtattctcggtcttggtgttggagtggtcgcgcgagacgcgcagttcctcgcggggggtgttcagatatgaaatcactagatcgacgaggtcttgattggtagcgggttcgtgttcgcccgttgagtcctcggcttcgtcggcggactcatgtttgacgtttcgaggaggggaggtacggcggtcaacctgaggatcagaagaaatctagtcttagctcctgtttgcgcgaggatctatttggtctcaaactaaacgctccgttgttctaactcaccttgcgcttcttcgcggatggccggctgggtgatgagtccggagcctctgcgtcggaggtttcttgcagttgaatttccttgcggcgcgcgcggcggcggttcgtaagcggcattatgtatagacgttcactcttcctggtctctggtatgatataatagacaaccaaagccggagtattttttccctcccgttgcgtaggcaatcaagtccgagtcgaagtactccacaaacaagcgcggggcactagagaggaaatatgatgacaaggcagaggcgagaaaaggcaaaacacagtttaaataaaaacaaaagtcttccaaggttggaatcggatttcagcgcctccagaatcggaagaccgttcagaggtagaaccagagaacgaagaacgtcggagcatagatttgccaccacggaagaaagggaaaggaaaaaaggaaaaaaaaagaagcccagatagactgtaaacaagatcaagaggctggatatctttttttttacaaaaaactcccccaatcgaaaggttgatattgtgtggctggatgttattatcgataatccctaggccgatcgacacgcgcaatggcgtctgtttgggtgaccgccttgtcgcgtaacgtgtatgacacagcagaaaaggatagaaaggagaagggaatgaagggaatgaagagagagaatataggaaagacaagagaaggaaaacaaagtgtacaagtaagaaaagaaaccgaagtgcgattggggatgtgaccgtaaacagagtggtggagtttgtggtaataacggtgtatggatacagggaaagctgccggaaaggctgagatagaactgaaataccaataccagcacgtgctcagcgtgggattgggatgcttccgagtgcagaaagtggaacttcttcatatccagatgcagagatgttctatgttgatgttctatgatgcctacataaggatgcagttggtgtagatatcctgtttctttgtctttattgttcttactatgcacatatccatgtctaacacctgtcttaacagctaatttagatttccctccctcatacatacacgaattctcagatcaataaaaatgagatctgcccgtttgcgtcatcccccggatctggcttagcttggaatgttgatttgcctctttgggtttgacatgtcgatctaaggtcacatcgctttggatcttctcaccttgaaagggtctacaggaaagagtcaagacgcaagcaacactttacgtaaataaacactttaaacagttcaaagggtttcatggagcgctacctaatattcatacaaacaggaacgacgcacgatgaaagcaccggaagagtatcagaaagaaagcggaaaatttctccgtaagaaaaaattaaagccttcaaagaacaaagaagaccaggtagaaagggggtgtagagcggaaggcaataaacaaatgtcgtcacggcgtgaaacaagctacggccaataaaggcagaaagagcggaaagatttactgaggcatcttggcgtccccatcctcgtcctcatccacaccacgtaacatgggatagaagactctctcagctgcagagttggcgtgctcttcctggggcttctcagaagcggcacgtgcactggcagtctcaactccctccatggcatcgagtccgggcggagaagccgaagagttctgcgctccatattccgcagtaaggctaccggcctcaagcaattcagaaaccaagcgacggaggttctcaagcaggcggaccttttcgacccaggcaacgttgacatcgcgctcggcgacttcagtggccgcttgcgcagtacgtttgacatcctcctggtcgggatcagacgaggtacccgacagagcggggtcaatcaagctctccgagatgtgaatggccttgggagtgcgctcgccgtcatccttgacatcatgggagatatccatgcggtcctcggtggcagcacggtcggccggcctggcgcgttgcaaggtaccaccagtgtagcggcggcggtcgtcgtggtcatacgcgccgctcagggtagaaggcggtgcggcacctgaggcggtcgggtaaccggcggccatgctgtcggcgacggtggccgacggcaagcgggggtacatacccgggccgctctcgtgagggggcgacacgcggtgagcatggtgcatggagataggagagcggttggaggtgtatgactgtgcgctggaaggcggggtcaaagctggggtgccgaccgatggggagtgggccgaagcagccatgggggctgagctagttgcagtaacgtggcttggcgggagctgggtcgggggggagtgagtggcgcgatagttcatgccaccatgcacgtaatgcgcgccgggctgggcaatgccggcagccgccacattctcatcgctttcgtagatggtattctgcatttgttcgaggaattgatcgatgttgattaaatcgttcttagtccgaacattggacatggggggaaggtggtagcccggagcctgggaaccaccagggctgtaaccaccaccgccgccgaccgcaacagacgcaggcatttgctgatattcaggcacgggaccattgaggaagggaagctgaagggcctgcagacccaacagacgctggccgaccgcggcataggaattagggtcgaactggcggcgcttcaagtcgccaaaaaactcgttcaacgcatcgtatccacgcttacgatcataggggtggcctccctcttgtccttggctcagggcatagtacacattgccgtaggaatgcgggttgggggcctgaggtggggggtgtggctggtagtactgtgggggcggtgcgtgcgaatactgcccattgatgccgttgatagggctctcgaagtaatgggtggcagcagcataacccttagggttctgagggaacatcatatccggatgcttcatgcccggttccggagagcggatctccgagtcgtcggcatgggtcttgacatgcttcttcagatcctgaggtcgcttgaaagccttaccacagaagtcacacttgtgaggcttgagcggcacgtgaacacggatgtgggacgtgatatgatcacgcttgactgtggtcgtgttgcaagtaccccactgacaggtcaggttgagattgttggtgcttttacgtccaacatgtcgctcacaaacatgctcctatccgttattagcatctttttttttctggaattgattgatcccacttacatagagagactcagcattgggtgacttctcagtgcatccgacccactggcacggcagctgctcactggcggccgcagcagcggcggcgacggtcgctgagaccgaggcggaaggaggtgaagtggcctggatggccgcctggatggccgccggctcagtcaccggcgccggcacggctgcttgggtagaaggagaatggttctccgtcatgatgccaagaaattggattagttggcggaaatcctagaaagcaaatgagaagagaaaacagaaaaaggatccagcgactacgaggagaaagacccgatatgtatacaagaggaaagagaaaaggagagaaaacggggactccgcagaagaggaaaaggagccgagcctttgcccagaaaataccgcgttgctaagcctagcggaaagacaaggagagaaatgcgaagaccaagaccgggccaagagcctgtgcgggcctccagaaccgaggggcgttggcgccatggcttttgactggtggaccgagggggggacgaggggctgtgggtgagcattccagggctaacacgtaccaccgtagggtacagtacgggggggatggtacgtggggtacagtacggtatgtattttaataagatttgatctctggccgtctatcactggcctgtcctgtctagtaagcgaggctaaatcagttagtgcacttgctgcggagtactgaaattaaccagtgcacggcaatgttgcatagaaacatcacgttgccgagaaagaaacagagttgccggttcatattgccaagccaacgtccaagaatcatcctaataggcagtgcttcttggcagccaagtgattcctcttgccaataattcccgctccggagcaccaagactcaggtcttggactcttggagtcttggtatgaccatatccctttcgtattaactttgtctctggtgtgacgagtctgattaatctggctgcctggtgcccttgttacggccggcatgcatgagtcggtcggtttcggatttagatcaccacatctgaaggtattgccatgtaaccatatgttctggcttctatattgtctatttcctatatattctatacttctctagtctagttttctattctattctatccgtaacattggacctgacatgtcagaccccaactatacaactcaccaggatcaatcatcccgaggtcttcacaagggcctagcccaagcattccaatcctccttggagcatggcttggccattggcttggccagccgaacccgaggcaaccacgtggacgtctgagctccgcacaagtaccacaagtgctaccttactttcccgagcggtacctccgctttggctgataccaactccaaacgttcaacccaaccttcgtcccctttgtcacagggaacgcagcgtgccaagtctcagggtaccctgttccatccgaccgaaggttctcccaaaacaccgcattacccttgataggcttgaatgtgatccccatgtcattccccttctcatcccgctgctcacactccaaaaactgacaccacttctccccagccggcatcctcaaccgcgggaaattcgtccccccaccttcacagtccgcgtcgatatacaccataaacgtgctgaagcggtcccccccgcgcgccaacgacccggcccagtcatagtggtgacggtagtgcccggaggcattgtagcgctgcgcccacatgcgctcgatgtataaatccgggtgccagccctggaagcggcgggcgcggtcttccaggcagcggactgtgtcgtcgcggtcgaggagggcacggtcggagaggcgtttggtcgggtctacctgttctgttttgccgtcgtagacaattgaaggggtgtatttgttcacactgggattcaggggagggttacccggttagcttggttatattgtgtgttttgtgtgggtatccgtgttctcggggatttggttgcggttgagattggtgagttacctcatgtccaggatatggtttgcttcggtttcggagatgaagttctcgatgtatatgatcagcggttcgcgtgaaaggagatgcacgcggtactcctcggcgctggcgcagcggaatggcacgccatcttcggggctgatgaagctgtcgtcggtcaggttgatgcccggtcctggtgcgctggactcatcgaagagctcgtcgctgtcgctgggtggtgccactaggctcgggaagaatccgcgcactaccgggtccaggatgaagatatacaaggggacgaagtagagggcccaggtcaagacggtggaaagctttggaagtgaccccattgggttggctataaatagtcccggcaatatgtatgttgtaagccaagtaaatgtacaggaggtttggactgttagctctccatgcgaccggggtggagggttgcatatgccaattgatctgtctttgtacaaagatgaaggcccaagggcaatggaagaagaatatgatcaagaaagagtgttgtattgcaaggccatcttgcgaaggaaagggtttggacgttgaggtggaaatgtcgaagtatgtgggtctaggctaggctctagcccgaagttaacgatgagcaggcttcattggaaaaatagctacatatgtaggtatacggggttagggcgatcaggagtgaagtctggtgtcaggtagcctattccgtaggctgatttaggaaaagagctgtacggagtatatctggatatgtggccaagagattgagcctacaactgtcgaaatgcttatctggttcgtcattacccagataggcctagtcaaatgtgatattctatatcgccggaaatcgctacatagtccttcagagctgccgaaaaaagagtgaccaaatccgctatgtgtggagaatgtatccattagatccattatgacatacgtaggccatcatagctagttatctcagatagttttaggccacatacaccagatatgacgtcccgacgataccctcgccaacaatatacaacaggctcacgacactagaagttaaatattgcatactctcttctattgcctaaaatgatagtattttcccgattaagcgaagatctacatgattttagagtccagatctccagggaccaaggatccgagcaggggtaagtggcaaatgcatccaaagaccgaagagggccaagtcaaagtgcatggtagttctgaataccactgcaaattgaggccaattggacagcacttgagcattagcaagacctcgggaagaggatgtctagtgtctagtaaacacagacccagagatggtaggtatgtatataaacgggcaaggtggcaagaactagggatagaagttaggggaagtctcagactctgattgcctatcatattcctacctagtaaatttagtatacggttaccaatagaatgtctaataaatataaggcccagatatctcggccaaaaggagaaagtaaaacattccattcctccgtaaatattcaatcttcatcatgcattagaacttccgaccttcttggcttcggagtcattgatgattgaacaattcatgttcgagttacctatgtacttaactgtaactacgaaatacactgtcgatagaatcaaacagggctagctaccaggtataagacaccgcaatggagcccaacgagtcttatggcgcgctcgactatcgccgtcagggtcggagtcattgcagcacctggatctcaaaagcaaggtaatactagcagacatccatggccaaggccgtaaaatgtgaccgctcgaatttccctcagtcttggcccggacctatctaacagcgaggtcggcaattatcgccggcgacgggttgaatccccacatattgcccctgagaagtagaagttagcgtcgtgattttctgtcgatgaataaggagtagaatgtttgctcgggtgagccttactggttctacgctggtcccgaactgagctgctcagcgtagagggatggagcgtgattgaaacattgggataactttccatgcggatttcagggtctcaaaagacatgttgacacgaagtcagctttacaacacgtgcagcctgtaggctcgcaagtattgaaaggggaaaactgagatttgagggctggttggggaaggaacgtcgtcggataagggttgatccagtacttgatgcaactataccaaagcacatagaatgttcacttatctcgctcttactcccattgaatcaataatggaccaaacaagacacatcagggggtatagaaatccggtatacatttataattgcaaaagaaaagcgagactcctaaccccaaccaaatatcaacagttgttacaccaagattttgggcatcataatagcatatcctcgtaaaaggcacagcaaacgaatatggcaaaccagaccaaggttaaatgctgttagcattcatccactgagcccaatcctcagcagacgccccgctgcccggccgataggcagcattattgccaaacagatcatcaaaggttatccctagatccatattcatgcctatattctcatcgatgcccatgctgaaaggaggtaatccatttggagcgggcatctcttgctgttggggtgcggtttcaggtgccatgtcagttgcgatgttggcctggaaattgtagcccttccagacgaaattctggttcgggattgagaccaggtctgaactgctgctcgcatctgtcggagtctggctctgcgatattggggagtggacgcgggacgaagttcgggagtgggaggggcggaggtggcttggcactgatgacttcatccctgcggaatttgtgatggggtagttcggtatgtttttaaagtcaaaggtgggagtgccccctgcgctggagggatccactggtgtggtgggccccatgcctggggctgaatcgaaggaatactgtgacggcatacctgcagggtcgtgccggaagtgagcatcttccaaggtggacatgggctgtgttggatacgcgaatggatcgtccgatgggaacatcattggcatgagatctgggaggttggatggattggtgaattgctgagcccatgctagacttgatggctcttgattgggcatggaggaggtcatgctggaggaagaaatatgttccggggttgtcatggtttctgttagtaggtcaggcgtggttgaaatccatgtggactggtgatgaatatcagccgcagggcgattggtcacaggctggacattgtccacacttcgttgccggcgattctgatcatcggcgacagccggctgtgacatcatttgcactggaaaagtgcttgaccgaactggcagcgtcttctcgaaggatggcttcggctgaggttcggcattgttcggctcaggctcggcggtgttggatggggcggggcgcttgagattgacaggggtctttgagctctggcgatttttcaacatctcgggcaatgttttgaacaggcactgcattgtaattagtcaaggacattccaaattagatagaagaacttacgtttaagctctgagagcaccggtcggcagcaagactcttcttggccaatccggctagagtatttttgccctccatggcatctttcaggacgccatctttggctgtgggcgaatccgggttctcaagcacgaagaagatcaaagagaggatagcgaagtaggtcgtatacatggtaaaccagaaggatccattgagcagtcctctcttttgcattccggtcgtgatgtgaacaatatttcgggaaacgctgacgcaggctgccgcgcaggcatatgatcgcttgtctacgccacgcgcttgcgaaccgccggtgacgtagtggaggaatgggcggtacatgaccatctggacgtgggcgtagcttatacgcagcaattgccggacactagttatgttagctaaattagttccgagcaccactgtagactggacttaccgttctagctggggcgacacttctgtgcccggtcgcagagcagggggtaattcctccatccaattttgcagatctcgttcgatctcccggattttggagtggctgaccatgtatcgctggtctgacttcgagcgataacgagcattcttgactgggtagatatatttcaccacctttaagatgatgttggaaagacgagtgtgtgcattgcatccagccatcaacggtgtatagttagacgggggttgagtaattccttcggaagtgatgaaatcaccatcaacttccattgggtactcttgatcgatatcgtcgtcactcaggatctggggaagacccaataatgtgctcacgtagatgtccatcttccgaacgacccagaagatgcgctttcgaagctctcgttcgaggggattgaagtctgccgcaacagagcgatggagacctaatcgcagtgctgaacgaagtgcaattcccacatatgaatagcatgtgctcagcttcgcggatgattggaggaagagaaccataaagcagattgcttgtagagaaaccaagtcacggcagtcagtgatctccagtagttgtcgaccggccttgaagaattggaacctgtcaaagaaattaggcggtgccaaaatcaatacagattaaccatgacttacccttggcctattgcgccttcgtagccagccaaatccaaggtaccctgtcctgattcatcgtccgagaacaagcagccaacggcaatggcaatatataaaagcggcaagaaagagtgatcttggtttgtgaattgttccgggggagtatcgtaaatgcgctctagacttgcaaaaaaagagggtatatgcacaaatttcatcaaggagcaggcatgatcgatcgcattgtggcacaaacggcgcgcagccgcccgcggcggcaggtcatgtgtgggaggtaatgttgaatcttgaggcgactcggacacagacttcggactatccatcatatgcgcacttatcgaggggcgcgatcgagccataggcgccgtgatatccgcggcgcccagctgtttgcgcaaccggcgaacaaagagaacgcccgaggtgtgaccgtgataatcccaatggccttggtcatctcgatctaagcagcccgaattatcgaccatggtttcgagtagtccctcgtctgcgccttcttgcgccgggtcaagtgcgcctgacggtctgacatcttccgtcgcttttgatttttgcgcggctgtgaatttctgttctgtcgcatgcaggtctagttgtggatcatcgaggtcgacatttggaagaacgattcggagtagcgcttcggctttttgaaggcgattttccagggcctcgacatattgcggggcgggattccgacgacggttggaaggctggtcatatgagcaatctagaaagatttgttagggcaaatggaaaaatttcgagatataaacatatggggcgcataccataactataaacagtgcaatgagtacacggctgtttgccatcgcacttgattttcttcctacgacactcgtcgcatgcgcggccaacgcgccgtctcttctgcgccggcagtgatttggagtccatgatggtggcatcaggggtaggagtatcgtggtgatcgtcatcatgcgaatacttcaagtcggtcatgggcgcgggatcctcctcattctcgccagaaagagggctcgtcgtagtcgccatgactggatatctgaggtgcgtagaatgcacggagtcatgtaaagatgaatatggatcttggcgggcaattcaaagtgaatactatcactatatgaccaaatatcactagggcatggacggccctatattgacagttgtaagataagtagagtcacgaacgaagactgaaaattcctatgccaagtccgacaatgtcgatcgaagtctcggtggtgaaaaaaaaaagttcgctagaatttggagtagttgaagggtctgagggggactagggtcttgagggggggaaatggagatcgacgatgatgaaatgattattcccgagggcggtgtgaggaaagattatatatcccaagagtccaggatatcccaatgtatatatcttggagaaaaagaacggccaagttcccgaggtcaaaattcaagcgagttgacactatagtttagtcattcagagtcgcacgccttatgactggttggtggatatcggcggttcatatgggcgacaccgatcaaataaagttccgccgtcattttccttttttccagaattttcgctcttttccctttaatttgaggcattttcggccttttcaatgtataacaggccgaatctcccaggtcttagcccggctccactgccccattcgtctagcccccggtcaattcgccgacttccatgtatgtgttgtatatgggattgcaaagcgaacggcagcgtttgaattattaataggcgtgctggggctagttcactcatgactacctcgtatcagcctcagatgagcctgtttgagtaagatattaccggttctggcatatatcatccatcgacggagtatcccggcacagaaaagggtgatcgtctgggaactaataatacttccaaggttcctcatttctatttgtgtgattcgactatcgcgacaatagtacggagccctccgtttctattcttgttccctgcgtaacaggaattgccgttgcaaggtacaaagtacacgcctggacccttgaacgcccttgcgctgccatcacgaagggatctgccatgcaaaggggtccgttgaaacaaggcaatatgcggcaaatagcttcgacagtcctggaacgcgaaacagggggaatgcgaacctcgaaatgacctataaacgacaatctattttgaggcctccgaagttcgggtttccgataagcctcatcatagtgctccacacggagtatataacattgttcgccaagtcacctgcgtcataatcgttcagaattatcaattagcctattattaactatccacttccttttagccatcgatcctggcgatccctcgcatcgggcatggcattccatttgaaattagcccctgtggcacgtcccactttccccaaggtggatcggcatgtataacaacgccaacgcgactttctcgcgacgttcgctgcctcggccttatatggctcgtctcgtcctatgccgatttccacaggctatgggacaacgcgatacatactatgactttctacctcgtcaccttctgctgcgccttcgccgcgctgggatcattcctgttcggctatgattcgggcgtgatctcttctagtatcgagcaggaggcctttctgcgccggttcgggtctcctgctttgtctgatgccgtcgccgggggcattatttcctcgtataccggtgagacttcatcttcgttgcatcttgccgcgacccggatctaatcttagtgatcaggaggcgcaatcgtgggctcgatgctcgcgtcatatgtctcggactactatggccgccgaatggtcctcttcatcggtggtctgcttgccactctgggtgctggcctccagggaggcgcagttagtatcgccatgcttatcgccggtcgatgcatcgcgggtctggcaattgggcagatgtctgccattatccccgtttattgtgtaggttgatacacggcccagctgctaagcctcgtctgacgtgagcacagagcgaggttgccccgccacagattcgggggatgctggctagtatgcaacaatggatgcttggcttagggttcctggttgctgtgagtaatcgccgggattttgctacctagatacgatccagctgacagggtttcaagcgatgggtgggatacgggtgtactctccgaggtggagccttctcctggcgttttccactctcctttccagtcataccagcaataattctcatctgtggcatctggttccttcccgaatcgccaagatggctcatcgaaaagggtagagagggggaaggtcgctcagtcctcgcccgactccacctcaaccgaaacgcaaccaacaaccagctactcgaacacgagctcttccaaatccaagagagcctagcatccgagaagcacttcgccgtaaggtcctggcgccaccttctcctctccccacggtggcaatgccgaatcctcctagcctgcggcttgcaagtattcacccagtgctcaggcacaaacgtaatctcaaactacagcccgcgcctcttccaaacgctcggcctcacaaaatcaacatccctaatggtaatcggactctggagcgcgctggcgcagctctggaacacgctcttcatgctattcgtcgacaaagtcgggcgccggaaaatgctcatcccatcccttttcggcatgggcgcagccctatgcatcgaagccacactcgcgctgtacatcgatttcaacgaccccaacgccaacccacatgccctgcgcgctgccatcgccatgttcttcgtcttctcgttcttcttcacggctctaggcatgatctcctggatctaccagtccgaggtcttccccacgcctatccgcgcgcgcggctcgtcgatggcgaccgctgcgaactggagtgttagtcttgtcttcgcgcggtgctcgcctatcgcactgacgaatatcgggtctaattatttctactgctttgtcgcgtttaattgggcggcgatggtacttgtttgggccttttatccggagactgcgggttgttctcttgaggaggtcgaggatgttttcacggcaaagtttgttgaggagcagtcggagcgctcttttgttgacgagaagacgccggtggctattacgccgcgctcgcagattcggcgccaaggactgcatccgctgtcgatgaatcctacctatgagcatcctacttatgacactgctagtatcggtagcagtcacagtgggtctgggaatgatattgaaactaaggcggtttagattgtacgatgtaagatttatgatatgaattgatgaaatgaagtattcacgaagagaacatcttgtgttttcgatgtgatttccttggaaaataaaatcgcgctactccgtctacttcgcaataagattagaaaaggaagatttcaaggttccaccaaattgcctctttgggaataccaagacctacgtccgaaataggcaactagatccaccagcattttcagcagcttgaatgcattattgatagcaaaaattgtctcaattaagaccaaaatgactatcacaatggataaagtcaatcaccaactaggtgtagtgtttcgtctgtgagggctttgctttgatgagtttgggacttcggttcgagtgtggggtggatttggtgctgacgatcgatgcgtgtagggtcaagtcgaatgattgcactcttttgcccagaacttggatgtgctggactttgatggggggattgaggctatggatctggggtttaatggggtaggtataggatggaagatagaatagcatagggctatcggctgctttggttccatagatccgaatgttgacgcgtcagcttatgagaagagcatatgggttcaagttgcatgggcaaagcgcgtgtggaaattcagtattcaatagtctatacagtataccacttctacctctatgtggccgtctattttttgtgagtcaaatcagaccgtctaaatcacaactagcgagcagcaaatactttaacagcaagttatacaaaccccaataaaacatgtggtaaatggccaatattgcttaaataggctcgtcacgaggctcaacaaggatctcgttgacggagacatgctcaggttgcgtcagggcgtaaacaatggagttggcaacatccgaaggatcgaggatcttggctccggatggctctccgaatttcttgacggcttcagcgtccgtcgacatgcccagtaggtcagtggaggtgttgccgggctggatactcgtcacgcgcaagccagcgcctgcagtctcgaggcggagggcttggagggtggcctcgacgaagaacttgctagccgagtacacacctaggccagggaagacctttcgtccggcatcggaggagatggcgacaatatggccgcggccgcgcgagagcatgctaggcactgttgacgaaagagcgtgcaaaaggcccttgcagttgacgtcgactgtgcgctcccactcgtccgtctgcgtgtttgccatcatggtgaagtacatgacaccagcgcatgcaaccaagatatccactggtccgagctcctcacttgctgcttgaacgagagcttccacctgagtcttgcttgtgacgtcggttgatcggaggatacacttcacgccgtggacttcgaccttgcgcttggtgctctcaagagcatccaggcgtcgagcgccaagtgctacagcacaaccctgcttggctagggcggctgctaccgccgcaccgatgcctgaagaagcaccagtcaccacggcgacttgaccgctgagtggccccttcactgaaaccccgttgggtcggttgagggcattctgacgagatgggggccggggtagccatcctcgcgcaaaccagtgccgagtgtaggtctccagcaacaggctgtccaccttgggacgctcgataacggcccggaaaggcctggtcaaagcgttatcaaggaccacgatatctcggaggaactcgacagtcggcatgccactgcgaagaatatcgacggtaaacgaaccatcaccacccttggccgagcctctcttctcgaaccacaaggccacccattgatcccatgggagaggtttcgtctcataaccaagctctttaaggtcctcaaagaccgaccgagtatcgaccggcgtagggtctccgagatggaacaccgtttggtctgcctgggtcagagtggcaaggtgcacaatggatttgctgacaaagttcacaggggtcatctcggcacgccatccgtccacctctggggcgtatccaagctggatggattccacaatcaatgcagtgagcaaatcccacgcattagcggagcctgtgacactgtgaccactgatggtaccgcaccggtgaattttgactggcaatccacgctcaccagccttgagaacgagctgctctgcaacccactttgtctggccatagccatcgagtagctttttggggacatcttctatatctagtatagtagtctcgggccagcctttctcgccagatgggggcaagacaccattggtagagatatactgcacggtcgcgccacccttagcggcgagacgcagaatctctctggttccaccaacgttcgctccccgaagtgcagcgtaggggtaaacaaggttgacagtggctgcagcatgaacaattacttggacacgagccgcgatgttgtcaaattcctccggactcaggcccagtcgaggccgggaaaggtttcctggtaagatttcgagacgctccaggatagaatcgcgccagagtcccatatctaggaggttcctgcggattcgggccacacctccggcttgatcatcctgctcggggtcgctgaaacgcacaagacagatgattttagcagaggtgttctcaatcagatcattgagcaagaaagcgcccaggaaaccagtcacaccagtcagaagcaccgtctcagccgagctgattgaagtgaacgcagtattcgtgggcttaatgtcctcgtccagtgtggaatcggaaagcaagacagcgggcagatttgcttgcacttcttcagtgtggccatctctgacagcacgcacagtctccaagtggccggaaagagtagtgttctccgcaagacgaggaataggaacacggaagccgaaacgtctggaaagcttggatgacagatcagccagagacaaggaatgtccacccagatcaaagaaattatcttcggccttaatcaggctctttgagactttcagaacagcctcccagattgccgcaatgtcatggagaccgatcgggtcttttcctgtgcttttctcgctgccattaggactagagctacgaggcgaagggagatttttcatatcaaccttgccagagacctcgttagtaggcaactggtctagtgcaacccagagagctgggatcatgtattgggcaagacggttctcgaggacacgacgcgagctgggggagtggccggactcgttgatcacgaccgaagggcgatcggaggaagcctccttatcggcaacaacatatgcgaccagttgtcgttccagtccatcgccgtacgcagtgacaacgcactgactaacagccaagtattggcagatgtcactttcgacctttgccggcacaaccgaatatccgcgcagcttgatcattgcgccgacgcggccggtgatctcgaggaatccggaaggcagcttgcgggctagatcgcccgttctgtacatacgagcaccgggtgtggaatcaaaggtgtctggaaggaaagcctttgcagtggtctcgggaaggttaatgtactcgcgggccaacaaaggacctccaatgaagagttctcccgatgtgcccgtctccacctcctgtccatcctcgtttagaacgtaggtgtgtgcaggaacaatcgatgggccgactgggcagtaaatggagtcgccatcaaccatctcacggatatctccgcaggcaatctcatgcgtttcacacgcactgtagcagttaagcaagcgggcattaggaataattttgatggccttgcgggcaagatcggttgtcaccacctcaccgttcagccagatgatgcgtaaatcaggcacacgagtaccgaaccggggatagcgtgaaagaacggtagccaggagtgtgggtgtcatgagggtttcagtgaccttcttagccgagagcaggtcaaccagagctgcggggtcatagctcgtttcatcgggcacgataaccacggtagctccgcgcagtagcggccgcagcatctcccagatgaagaagacattgcaggccactcgatcgcccggttgtacgtcctgcactgcaaatctcaaatcgtatgatagtaccggggcgcggtgtggattggcgattcctttcggcttgcctgttgtgcctgacgaataggacacaaacgccaaacggtccaaatcgtcatctgcgggcaacggagaaggttccttggcgtgtccattgatctcggcaatgggtccatccaaggcaattacggggacgggcgccttgattttgtcggtctcagatttgtgggtgataatcacggcggggctagcgtcctcgataacatccgccaagaggtccgcggggtaagccaattcgagaacaaggaacgcaccacccgcacggagcgctgccagacaggcaatcacgtaatgtgcgctgcgaggtaggagcacacccacgagggtgtcccggctcactccataggtccgtaagcgactggcaagagcctcaacctcttcatccagctgggtatatgtatatgtcgtggtctcgtcttccagagcgatggcatctggggttgcctgtacctgtcgcttaaatagtgtgggcaaatccttagtgatatcgaggatggccattgtttcggaaaaggggtatacaggacaaaataaggaactaaaaaagatatgattgtaaagttgtggtcatagggaatgtcgatgtacgtcgatggtaaagagaagaacgaggaaagacgaaattttgttgagattccaagagcttcgagcaatggaacctattaaccttccagggccgtattcgcgtggggttctccgggaacgggcttcttatcgtgactccgataccgtctacttccatgtcaaccatttaggtcttcttctaattagaatattgaatatcccgttaattctgctatagtcctctttctacattcctcttcatgtaagttatatgatgtcaagcctcaacaaatatgaagaaatcacatgtgacttccaaggttggccccacttaagccatttgcatgtgaaagggcgcttttcccaacactttggttggaggcgtaataaccttggaaccttggaaccttcgaaggcgccatgggcaattggaagaatcttttttatttttagcgttggcccaaggaaattaagaaaccgccgactaaataggcgtgaacatctacagattcaggcatcaaacgcacagaccacttcaagcagatctgtactaatgcagacccttgtcaaagtatcagtctcatcttcaggcgcaaaggaaaaagctcaattgccgctgtccgatacttgaagagctctcgacaaaatacattaacagaaccgttgacttacagatatctcaatagccaaaaaaagttcacattcattgtcgctaaaaagattaaaccacgtatccacctgggcacgtgcccacttgcctacctaggaatagtggcacggccgaatggagcttcccgagattcatctggaaccaatcctgcgatattcatacataagtcatgttcatccatagatgtctagctgttgcaaaataaaacgttgcactattaatgcgtattctgatgctacgtcatctatgcagcaattgatcttgtccacggtttccattggcttgcgcatctcacgcagaatgggtgatggggtgcatgctatacttcgagggataccatggggcgaatagtgctcacgaccatcatttatgattaacacatatcctttagccctgtcacttcacaatcatctaattccatcgatagttcacggtatattataagggatagcaagggtatatacaagacaagaaaccgtgaaagagtgatacaagagggtagaaaacataaacataaacataaacatgaaaacataaaaaaaacacaagtcatctggtccaggccagtgctatacattactcaatgaatgagtgcatcgaggatcccacgacgaagacccgcgtcccagagtcgataagtacccagagaagtccgagagctcctctactgaggcagcaggagcaaagccggcggcactggtgggccgtcactgcgttcaagcagggcttggagaatggcgtcaaatgcagccattcatctcgacttcgctgtcatccacggatttctcgagcgagcaagattgctacacgcgctagggtattgcagtactcttactaatcccacatcgcggtagttgttgagtgtcattaacgctgtgaaatgggcgaccgtttgtgtttggtcatctaatgtgttgcatcgggcgcttggggtgccgcgaggatttgatggaggatggatgtttcttggactgccctgtgtcggatcatgtccaatgattgggggttgtcacatcaatatacggcaagctgctcacaggatcggagaaagtcgaataattcttcatactggatctcatccgctgggatcgcttctgagtaaggtgggaatgttggttgaggttcggggctgacttctgagaagcccgaggaggtggaatatagcggagatagcattgagcgggggcttagagtgggctggggtgctggtggtaaagtctcagctgaggctggcgcatgttggtcataatcatagaagaaggtctcatctcccggcaagatatagttctgccagttggtcatctcgcgtgcgtctcgcatgtgcacctggcttatttccttgtggcctagtcggggatcagaatcctccaaggctgcggtattcagacaggaaatgattgcatcatcggagatttcgtgagggttgtcggagcggtgctcctggagcaaggagacagcaggatcgctatgaacaaggggattttgagtttcgtcttcatcacgaagaattagctgcatatactagaaagggtaatttggaatgcaacagtacctttgattatcccagacacaaaagtcggtgtataacagtcgttggccatgggtgactggtaatgggtttcataggaggaggctggcatatcgtccacataggagtcaaatattccgtgtgcatctcgctccaactctataggaagagtattgaatgtgtcgaattgcgcatcgctgatcatagtagttggcgatggcacgaactgatatgggagcatggagggtggtggccatgagaaattgttgagatgtagatcatagctcggacaactttgtggatttacatcaataaagttgtctagtagaagaggaacatcgtgagattggacagaagatgaccgtggaggaaaccgaggcatatcattagattcaatcaacggaggatccgatgagatagaatccaaaacaaacatatcgcagttagcctcaccattgagatcttctctgcgtgtagcttgctggatcctggttgatctcctcactcggggttcgttgttcttgttgtcaccgtctgaattcgctttcttctctgaccttcgttgtgcaccccgagtcttcctgcgctccccacgttttgcttgtggtgcctcttcttcactttcactttggcgagtgccgcctttcttctggcgcatatattcttgcataacgtgacgcttcacttgggttaagttggttcgcctattcttcgaagagtcgatgaattgccaccgcccattgctggcagccttatcaagaaaggttgacatctttctggcagaagaaacgtatatgagccgtgcgtctccttgtggggcaagggagggatagcatggagaggtttgaggatataatcgctggggcgagtctaatgtccgcccttaaaagaaagagatccaagaatagaacaccgaaggaagaatggggcaactctgcaaatattgatctaacgtaaaaagaaatatacaaacgcacgatcaggataactagatacagagcattaatcgggatatgcttctccactcatcgtctttagactagactagaacggtcttccagcacattggccaacaagtgtggagatcagcattacagcgggccagggcgcaaatagccgtgtatgagctatgcacctcttggtagcttgggggtcaaagtactagaattgggaccccaactggggcgtcagggtcgataagatcccctgaaaaagctgtgacaaaaccaactttccatgttgtctcctccatattaggcaaagcttgatctaccaggtccatatttcacagcaagtaaactggctccactacccccatatgtcgaatcatcaattctgtgtgtccgggtgtctacccggcattctacccgatctgcagtctaattcccgtaagttgcctgtgagttacagattgaaggtgatcatatagttccctcgcttagagcataatcacagctgtttcgtaccttgcaatattttgtaattgtatcttgcacggcgtgatgtgtcagaacctttcttcggcggaagcattgcatgacgtttctagctgtttctaattcgttgcggtagaacctgcagagttatgcacatgaatggatatagaggacctcgttggccacgaaattaaattgcttttgtggggttaaatgggagatctctgcagaaggaaagttcggaaacttttacaatctcaacggtatctgaacctgctgatcatctcgtctatattgcattatcgaattggctatggatactagatttgccgttgcggtgatacaaagcaatcataagatcgtagaatacccatataatgactctttgtagagatacaacaagcccttctgttgactctaccccagtggagtatataaaagttggattgacgtagtacgccacaaaccacaggttctacagaatagaatgctctaaatatcgttgcagaccgaacctttgagatttaaactatgagactatccgagctctccgcccccacgttttacgcttgcgacatgccctcttgggtatccttttagtcgatcaccgaccaccggaaccaattgctatattccgaatatccgttctccaaaaaaacaattaagatacgccaatcccatgccatgggcggtaataatctataaaacactgatgggttatcaggactggttgcatatgtgggggacatcctctaggctgttagtatgctccagagtgcgcgcagtggcttcaaaaatactgtactggtcaagacagactctacctaggcgaacttgcttgagccaccattcggtgagagtttcagcgtgagataaaacttggccggcgttctccccgggaatgccttttaccggcaatgaaaggcaatagaaccctaagctatgcaaggcacaatcaccaatgatgacattcccaatctggatcctgcatagtacaaggttcagaatctcctcgtcgctttgtccaccacacgacatactctcgggcaaatgcgctgtaacccagcaataatctggcatgtcgtcgtggggatctgcgattcggcccctgtcattcatgaacacactggcttgaagtttacaatcggacgtcatcctgtaaaatagtagaaaagtccttcttgattggctgattggtggtaaaaaaatagctccctgtggattatgagagaaacgtgagggaaccacggccttctatacgttggcaaccgagacaatctacagtggcctttgccagtctttgacaaagctccataacaatgaggtctttcatagccttatagatcaagtctatatatgctcgatttccacggatttgtcgacaaaggccttgcttgttctttgttatcttatgacagatgagtatggcatggttatttaaggatctacccgctttcatttcatactcatccttcaggtttcattaatccgtatccacagggacaataatactatgatactactagtctagatcgtacatcggtcgttccgtagatttctctactttgttgccactaaagtcccacaatgtgtatccacaggttcgataatgcccagaagaaagcaaattaaggtgtgtggaaattagagtgcacattgcatagggcggaatgtgattatcttccggtcttggagtacttttcaggtacaagtaagattaacccccgctgatcgtcgaggaccactatattgtagttcgatctgaccataaagcaaggaaagccaaccccatcggtctcagacttagataatctaacggtttcgaaataggaaagagcaaacaagttacgtggcattgtataagaatcgacgcatatactccttttggtcatgatcgccttggtgcacctggacaaattcccgttgagagggcttgattgttcgctttgtcaaatactacttctatttgactaccgcacgtctctactttttatacgcatgagcatctacatgactagacccttggatagttacccctctctgcccgaaatatcagtcaccatcttcccaaccgggtgcgaccatagattctgccataatttctctcaaacctcctgacatgttgacgagcattgtaaatcgcggtttcgcttttttctcgattctgcaatgtcatctgtatcgtctcgttctctttaaaatacctctgctcttgaagattcgtcctaggtaatgttcagtgctatagaggaccgttaatgggaaacaacctctaggtatagcggacgagacacaggcaacgtcagtcatggaagaccctggtgccataaatatcgataacctggtccggtaaaagggcgtctcagaggacccatttggactgttatttgccgaagcaagcgatggaaatctacagaactacatcgaccagcatcatactagcattaatatatctctacgacttaaatggtacacacaagccgcggaggcgatccaattcatttatcagaaaggtgtgatacactctgatcttcggcctgagaattttttgctgcacactgttgccggaaacgagctcgatcttctactctgtgactttggggggtcaacaaatggagatatagatggtcggcatctccccgacgccagatttttcaatccttgccttccgccggaatcgacgataagcacggatatcttcagcctagggtccatctactatacgataatgactggccattggccctacaggtctccaggtccattcgagtctctagaggagatggagaaataccaagaattggttgacgatctatttgcctctaaaaggtacccgccggttgacggactggcggctagacctgtgatacaaagatgctggacaggagaatactccgatttgagagctctcattgaagaccagagttggcagtttgagaatgatacaatttcaatgcacccataatacatgcggttctactgagccaagacaatgctatctgagctagcgcgtcataataaatgtcctttcaatgccctttcgagatgagcctacggcctccttatcgtaaacctctctgtcaacccaagctcgaattccgatgctggtcatggagctgattgactatgggttcgtgcagccagcctcctctgtctatttgaggccattgggctggaatgcatttgctgtagttgcccgattcatgtatagctggctatacatagtactattgaacatttctgggggcttgagcgctcttaggtaccctttcaaaacaattgccaattactacacctctcagaatccagctgcagctttctggtctatatctaaagacgaaggtgaccgccgatatcagatctcgcactcttccctatatcgttaccggaatatagaagtgccacaatgacattcataatcctttttttgaagagatctctgttgaggatactagtggcaatcaaagctccaaagagatttcaaccaaagatcttactcgtcctaggaagtatccgtggaggaacagaagtgaagtgggcgtctgtcgcgtgtctgggatctgctcaccgccttcgcgctcttcgcgcccagtccgcaactccgacaatgtccaatccagacatcaaggcgctggacattgaaccaagctggaatcgagaattctatatgcccaagagaatgtttcagattgtttagttctctcaatcaccacacaagcaccctcggcgaagacattggaccagacctcatctcttcgatcggcggtggtatcgcaacccttcaaccccgtgagaattcaacagtcaacgcaagaccaccaaaagcactttcccaattgtataagtgggatcgcacagaccggaaaaatcccgaaaattcatctgcaagactctacaccctcgatacaatccacataatgtgtccgctctcagtggaactcatatcggtttagttttgcccgcgcgatcttcgctcgcatatttgaacctcgcaggagtccacaagcttcatagctcacaattacgaacgggaattagtcgggagctatcatctcgaccctccgcctaacacagctatccgctccacttgtgaaagccatggcggagatggaggcggccgtcggcgcaaaccacatgaacggctccgcgaccaaaaagtccacaaccgacccctacgaaaccaaccccgatcgcattcccagcgatgacctgtttatctccctgagtgcgcaatacggccgctacacaccccgcgccgacgatttcacccctcgctttatgaactggtatcggtctgacccgaccgtgaactctttctgggagaaggtcgcgcagaaatactgtaccccagaatactcactaaatatttcaggttcgagggaggcattcgcggctgggagtataattatccgggttgaccgcgaactggccgacggagcggcggctgcgagatactcatctgctaatgcgaatgaactgttagccgcgcagaaggcagaggactcgctcagagagatcggagttgcagtcccagtggtatatttttgcgggacgattgaagggaggaatgtgacaatcgagtcgcgcattgctggtgtctcgctggaagttgcatggaggtatctcgacacggaacagatcgaagtcttcacaaatcagtgtcgccagatcctccaacggctcgggacaatccattccccctcagacgaaccatcctatgtatgccgtgaactcaattcgcaaattcccccctctgtcgacactcgcgaacgagatatcctatttacagacaaaaccaaggaggaagaactatctttgacacataacaacctcattccaagcaatattattgtccatgatgatcgggtggtggggattgctggctggcgacaatgcggatattttggcactgtcagagccgagaaggtccatcgactcttcagggatcttgggcctgcgtctcaaaatggcgtcgacacctccgagaatggagtgacgtggtctgacctctatgataatgcctacgaccccagtaaaggcactccgctggtcgcaaaccaagatacaccccttccgtcagtcaaaaccgagccaacaagctctaccctcgacaaattcccagctagcaacgacttggacacaaattcactaggtctagatggcacgagcgactacgcgacgtccaaaacagtggcgaatctcaagcatgggctgacgtcgagggcgtcatcatccgaccggtcctccccagcaaattccgtcaaaccagcaaacaaaaagcccacgacaaacactagcaaaaagggaactgcgaagaagccagccgccaagaagcgcaaggtaaatgacccggacgcagacagccttgatgggcggcgttcgaacacacctgtttcccgggccagcaaaacacctgccaagaaacaaaattctgtctcgatcgcagggtcacccgctcccgaagagaagaaaaagccgcagaagaagaagaaaaaagggcccaaaccacctactgcccaggagaatgacgactccgacagcttcgatgaaaacgcgatcttctgtatttgccgccgacctgataaccatacgtggatgatcgggtgtgacggcgactgtgatgactggtaccatgggaaatgcgtcaatattgatcctcgagatgcggatttgattgagcggtatatctgtaaatgcccatgagcgacggatctattacattcaaaactgactttatacactaggcccaaagtgcgcaagcgaaggaaagggatgcacaacatggaaaccgatgtgccgtctgatcgagtgccggaaaccagcgcgcgctaagacgaagcccccgagcaaatactgctgcgacgatcacggccgggaattcatgcgccaacagattcagcatcttaaaaaacgtaccggtcaggctaatggtctttttgaagatttgggtagtatgggtggcattcttacagctggggacttgaaagctgccgttatgggggtgacatccacacaagaattccgaaagctcggagatcgcatcatctccccaccaccacaggtagatgacaaagaaactgctatggctgtgatcaaaccggattcaaatccgcagaccggaagatggttgggagtcgacgtccatgccaagggcttggaatattcacccgatgagattgcgaagatcgaaaagctgcgcacgcagcgtgaggagctccttcatcgcaaggagatgcttgccgcacgcacaacgttcgtctctcttctcaaaccccgcgccaagggcgtagtagagaaactgaaacagcacgagccgaagggcggatggaaagatatctgtggctttgactcgcggctctcgtggtccgacgaagaattcgatgaatggcgactctccgacgctggaaagaaagctctcgcggagggaacagcggaagctttggctgtgagctcctcagctggcactgatgcagacggggacacggcgatgaacggcgacggcgacgatgatattgcattttggacgcgtggcgtgtgcactaagaagcggtgcgagagacacaagcagtgggtcaaagtgcagcaacaagatattctctttgaggaggaaacggcagagcgggacctcgccaagtgtgaggaggaagctcggtccgtggtggagcggggtgtgatgagacgatgggccgagaaggataatcaggcttgaatgccaaatggattttctcaagggtcttccatggccagccggatttcacaaaagcttgataccccttgacaaaaaaagcctcatggactggagttggtattttgcagattataacatagcaggatggtacctagtggctgagtttttgggccaattgcatacaaaacggcgctttgcgaggggatctgtcatgtttgagaataattttttgtaagagtatgaacaattgcatcgagatcgatcaaggtcaactttttctcacagtgatatgataaatggtttatcgttcattgctcgttccatattccccatttgcctagactcgtgccaactcgatctttgatcacttcgactatctgagctcccctcaaatcagaaaccaacaaatgggtatcgatgccttggtctaacgtcttcatgagcaaggtggggaacaaaggggggatatcagaatggaagacggagtggatgccatcttccaacggctgcctcgtagcatcatctccataggtagtagtatttccagtcgagggttgatttttatcccatcctggatacatagatcccagtccattagtattgacaagaatgatcgagagatgagaggcgtgcacacgagacaaatgcgtcaaggtgcgaagtgtagctgtcagaacggctgcacctcgagctgggttggaggctcgaattactccttcggctagagtatcgagacccgcaataatgaagacaatgggattgctggtggatgggcttgcctcggccgattttctctgtttttctctattatcttggatgtcgcgcagcgcttccgagaccttaccgatggcctgtgcggcattggggaagttttgtacaggaagtaactgcacagagtcaagtctacggattgcatcatctcttgatagaccaggctggtcatgggaagaagactgcagctcattgagtagagtcctcggggcaaaagcctcgaaacttcgtgggtggataatgaacgcgctcggctcagatgatggatggatactccgcaggtgatttgtgagaatgtgtcgaggaatctattgtaatacatgtattagtctcatggacaatttccgagtggtattgagtcggtcatacctctccgatatactcattgctttcgctgcttctcattcgcagcctggagaagccgaggacaaccccacaccgaaagaccccttccttggaggattggatgccctgtttccaatcatttttgaggttccagtcactttttgcggttgtctcatttgaaggaggagcttcactttccgttgactccggcggtcggagtagagaatcagcaaggaccggaaatgcgggctctgccgagtaaacatccattgtgcttgccatgattccgcgtatatacagccttgtccggttgttacagatctgatatcaggatataagtagaagaagcgaagagtgagcggtgggtggagacaaacgcgaaggtggatattccccgatgtggtctagcctcatccagcctatgagcttcctctttttgatcgactctacttgaacgttcaattcatgttgcttagatactaggaatactatgttggtcttggccatgaagtagaaattgcatatatggaaattttgatagagaacaagatgctcaaggtacattgctgtaaatatattatcaagctcgtttccatattccacgcccatcatgcacccagccaccgtctccaatgacatcgtccaaaatggctagcagatcctgccgcataggctccacatgcaggtcaccgctcctgaactctttcaaacagggcagattattcacagtatacccaaccagggagtacgaggttgcgagttccatccatggatcattagggtccatggaccctcgttgttcaagctcggtaatatgattatcctgagggggagccagctgcacatcaaggcgtcgcaggtgccgcattctcacaaccgcatccagtacaatttgcgagtgattgtaaaatggaaacacagccgtgtaggaaaagtatgtgaggccatctaagagggctggcagattggtcgggcgttgaagcgtacgagttgaatcacgtatcccacttgtgccccattctgtaagaaccgatgggacacatgaaaggaagtactcgtagtggttgtatgctttcagagaagatgactcgttaaaagtcatcgatgtccaagctcgtgatgctagaagactagtacaaggctgcaggtcaggcaggtgggatgggtcccgaggtgtgcactctcgttccaaaaccaagatctgtaggggcatatcaaatgcccagtggtgtccatcattgatcggggtagctagagtgtttccaatgaagactggcggccctattactagaacacgacaaggatccaaatagcggaggactcggcgccaccaaaatggatcgatctgacgatctgggttttcatccgcaatcgaaacaagagacttcacatattgacagaggtctgatttgaccataaacgattggaagttgggttcatcatggagcttgagccggacgtaactgaacagtttcggtcgcacaagttgagataggcgccgtgagcacagttcgaaatgcttgaggtcttttgttggagactgggtgagttgcaaactgggtgcgtgatgtagttgtccgaatgatggtggctccgtggataagtagaagataatctggtctaggagctcattggggagaagttccaatggagacgctggcacagacatgccgaattgctcatgtcgaggacctcgccccacattactatgaacaattggatatccagtaccccgtactgcccaatgtaacagtataccaagagtgcactagtcgactaagatgggggtagtcgtcggctgaggggatgaaagtgaagtgccgggcttccccactccactggctccactgaactctttgtaatcggtgactcagcggatggtctttcgaatggtttttgaaaatgagagttattatagatgtgtgggctcctttagaaaggaatatcagggtgttagacaaacatatacaattaaagggactacgagtataaaaaaacttatagaagcgtgcaacctcgtggtccgtgcactataatagattcgagacatgtccgatacgcaagagtattaggatggtattagggcatgaagatagtattaggtgggtgtattagcattagaatagtcggaatgacgtggaacaatggcactgtccgattgccaaggatcccccctgtacttacagaacaattgcttcttgaaatgacccaacaaggaaatcagcatagaatctactccgtacaaacaggggaaacccacagagtcaccaaattgtggagagcctcagcgttttgctgtggggcatgtctatcatggctggatacgatgtagagcacctcacatgagatgcaatggcaatgtcatgcccctcttttgatttatccgtttcacaaacttcccttgctttcttctcatgttcattttctcagtagatctctaaagtaagatactgtagcatcttataagaacaacgctcatcgtctctcgcagttatctatatactcccttcacaatggctcctcaacttcaccagcgtcctcctttccgcgcagagcatttgggctctctcttacgtccacaccagcttctggaaaccaagctcgcgtatgaggctggcaagatccccgaatctcaactgactgcttgcgaggacaaggagattaaagctatcgttgagattcaacaagagcttggctatgccgctatgtctgatggcgagtaccgccgtcacagtaagagatccggagagccattgggtgagtgaagttgacagatatagtgttctggggtactttcttccccggtttggacggcttcgaggaggtcaacaatgtcgatgtggatgacttccgtccctatgcccccgatatcgccgcatttctagaggccggccacaagcccggtgagagcgtcatttgtaccggcgagatcaagcacgtcggtagtacctatgtcgaccaattcaagtacctcgctagccaggtccctgccaacgaggtcggaaacctaaagatcactcttgccgcgcctaactggtaccacttgcgctaccgcgagggcaaggcttatcccaagtctgtatacaccaacgacgaggattactttggcgacatcgccaaggcctaccaagccgagcttcagatcctgtatgaggccggttgccgtaatgtccaattcgatgaccccaacctagcttgtaagatgtacctacccatccagccaatatcgattgacgaaactaaccttccaccaagacttctgctccgataagttcctcactggcttcaaggaagaccctttgaatgtgtactccgccgataccatgttcgagaagtatatcaagcagtacaatgactgcttcacaaacctgcccgccgacatgcacgtcggtgttcacctatgccgcggtaactttgtcggcagccgccacttctccgagggtggctacgaccgtatcgccatcaagctcttccaagaactgaacgtccacacctactacctcgagtacgacaccccccgcgccggtggtttcgagccgctcaagttcctgcccactcacaagaacatcattctgggtgttgtcactagcaagttcgccaagctggaggataaggaggatatgaagaagcgagtcatcgatgctgctaagttcatcgctgagggtaacaacatctccctcgatgctgcgcttaaccaggtcggtgttagcccgcagtgtggttttgcttcccatcgtgagggcaatgccatcgactgggatggtatgatcaacaagctgcagctggtccgggatattgcgaacgatatctggcccaaccaggcttgaacttggtttttaagagtaaacaataaaatcacttttctgtccgtttttagttctaaattctgcacggagctttttaacataccttggatgaatgttttaaatagttgtctgaacgagcatttgctatctttattcttgaatatggttaacgcttttttgaagtccgattctctgtcctcgtctcattgtaacacaagaagcaacaacggtctctgtctgcttacatgaagcgcgaggagcagcactagcttttgatgccccccgatctcacacaggctgcatcagggaccttgccacttcaagcttttgaggcataacaatcttctccttaaccagtctagcgatcacacgcacagtccacccctggcaattctccgtaacagatttccgattctccgcttggggaggaagctcctcctccgcagcctgtttcaccagcttggctactctggcctggtcttccgacacaacagccagggtgtagatgttggcagtgaagccagcgtcaacgacattgatcttatcagtcgacgggtcgtacttcatatcctgtgcatcccccgtgacttggtacacatatccgtagtccggctcgttttcgtcggcaaggaagagtgcccaatggttgggctctccgggggcttgttcttcttggacgagatagagatagagatggggattttcggccggtggcttcaactcctcggggttggaagtgtcctcagtccaatcctgcgcaccccgcttcctaaagaatgtgcggccgtcgacctcgcacacttctctgagaccccttgtcttgatgggagtccccggcggaggaaagacgctcgtctaggcgaatggggtattaatatcctgtttcctatgggtatgagccgttttattgatacctgctgtaaaatctgccgcatagtgtcgatttggtcgaagttcattttgctggttttgcgaaagtagtggtcagtgtagtgtggtagttacccaggtagatatcgtcagatgacgaaaccaatcaaacacaacaaatatgcagggatcattgcctttaaacacgagtcattcaggcaccgttgaagaatatcattgattcaatcagtctcagagctatttccttgcacaacagccccaaggaactcttcttccgagtccagtgattcttggtatacagtcatcattttttcttttcccttgccttctattggctcttttgggtctgctgtatgtcttgaattaagctcttcaaccaatttttcgagaccctctcctataccccttagattttgcaggtcctcaaacaccatagtctcttttgcttctttctcccatttatccagctcacttcttttgatgcgtatttctttgagttgcacgagcaacctaccttctaggagatctttgctgcgtttgagctcttcgattgttgatcggatttctcttcggagtagcataactttctcagatcggagtgaatcattcagagcttcgagaaagatctgagcattttcggcaagtcgctcaatgccagctgcagtctttcgaagtctgtggacggccgagtgcctcagctcccgaaggaggctgatgacctcatctaatggcctcgtcaaattttccttcagccgtgtggaatgccgacaaaataacttggtccattgggtaagctctacagcctctgtacagtcccagccgtgttctttcaagatttggggaaagtcctgctgagcgaactcgaagcaaccttcctccaaaagtctttgaatggctgtcaggacaacatgttgaccacggtagtgtatgtacactgggtagagcgatggaactgcaggagttctgtccgaatttaggctcgcaggatgtactgggttgggtcagcgctcgatgcagaggaactcacgacaatcaaagctcaccttcagtctccacgtctgtttcccgttgatgagtagcccgagggacaattgcatcttctcctgtcgtctctctctgggaaattttttgaactgtgtttgcctcatctctcgctgcttccgcctccgaagcttccctttcggcgctttgagtaggcgaaacatcgaacaactctgggaagcgaattttggcttccagtgtagagtcaaacacccgattctccaagagcttcttggcaacgttgctggttcggtcgacgttgtactcccgcagaatatctgccaatgcggttttgttctgttctatcaatcctttgactgtcttcaattttcgcacctgagagttcgagtcacgaaagatatgctggcatgcgaggtaaaccaacctctcatcagggtcatttcctgccatgacgtagcagaagcttgttgtgtcctaaatatttgcctaagtgccaattagcgaatatttataaacagtagtttgctggaatttctgtgatgtagacgcaagcagcgtctccaatcagtggaatacacctgaaattgtaaccttggaggcaccttcgcctcttcaaccagtgttataatgagactgtctgctatgctttttgggaggtcttttcacttgatctcagggctgtcttaacattgttcttccgtgtttggaactccaggaatgcttagttggacacaatacccgcaaccaaccgtttatcttcagcatcttggcctacgcaccgagaccgatcgcaggatcacggtgcattatataaccgtcgaatttttgattgctttcatcattatttttataaatctcaagaatgacaatgcacatattccaagcaaatagaccgaagctagtttacattgtatacttgcatggtgcttcatgaagaacgtatcggctagactagctagtactagtaatttcagtgaaacttctcagaagagaatcccactgaatgtcatcaatggggaatatgccgtccaagtcgccatatatcgacggccaaactgtaggtgccatagcaacatcattgggaggaacttcccccatagacacatccggccttgcatcctgagatagcgcattttcaatgatatttctgacttggtggggataaattcgagcaagctgccgcattttattgcagagactgcccacaacatctgtctctttttctgcagtagacatgccctcaaacctcacatccaacgtgttggcaagctctgtgacaagactggggtaatctgccatatcgataacagcctgggcttgggattcggtggaagagtcaataggaccagtaatgagattgagcagggtaaatactaaagtgggaatgtagcccactccaatacataaacgagcacttgtcgatattgtcatttgactgatttctgatattcgcaaatttctgatcgtgtgaatgagctctttgctccgttgaatcatattcattaacatggtgatgcggactgcgtgggtagattccatagtccacagttcttctcgaagacatagttcctcaaggcgtacctcaatgtacttgagttctgtgcgtattgcattctctgcagagatcggttaatcccagccaatcatataacttcaaataaggtccctgacatacccgttgacgaaggaatcccggcgaggtctttctccacggatgctttcaagttattgaactgttgcagcagacagccatgcatgacctgggcttgtactgttccaccgcttggctgtatcgaagcatggacgtcatccaatgttgccaaaaatgattgtatgtgaatgaacggtgcgatccatcgatctgaaatttgctcggttgatgataaattccgagtgcacctatcgatttgaatatctcggctcatgctagttagccgaccgagacttccatggaggctgagatgcagttagttagagctgcatctaccagtgcagacagtctcacctagaagacagccaatatgtgccaagtaatgcccgctgctcatctagagttaaattggtctttttgtgtagccccaaatcctgtgaaatagaaacaacaaattgaatcaacagcagaagccgcgggtgatgtttctccccaggatatgagtaccatgcgctgtgaacaagcagaccacggagtaattcgaggtttctctcagatcgtgccacgattctcatggtgacatgcttcataatttcatccgcgacaatcttgcgaagaggggacgcactgccgatagtggcagctacaatgcacaaaaagaggaaaggctgtgtacgcctcagactttcagccgtctcaccgcgtccaagcagaacaaaaggaaatttaggaataaagtcaagctggaaactcgaaactaagcgctcagcctcggcttcgctcaaaataccccgatcaacgatagtcggctggccctccatcgcagaggtagtaggcggatcgggaccgtgtgacggatcttgagcagcagcatgcagcgcgtcgatgtctaccgaatccaagtccgggtcatgactagaggccgagtcgtgggtgggcgggttgagagtatcggacggggtcatcacggtgcgttgggtcaaggtagccagctgtgacatcagttggtcgaccttcttctccagtacatccacacggctgcatccgttattaataaaactagcgctttttgttttgggacgaatcaccttggtgcaaccttgtgctttcgcttcgtctgcgggaggtcaaggtacgtgcatgccttgcccaaacgagcgcaccgttggcacaggtcagcagcctgcggtgtacatttcgccttagcggccgtgcaggccacacaggctcttcttttgacagggactgtggcgctcatgatgtcgctgcgggaaacggagcggccgatcaagatgtataagccgattgctgagcaatcggagggggaaacgggaggaccggagcgtccggtcggcgccgatttgtaataatccatagattcaccgaagtatataacacgagtcaatgtcgaatatcgaaatagaatcatcagcatagcaacttattccaagtaatcactggatatagttcaatcaattcaataaaaaatggcctcatacgcaatcaccggagcctccaagggcattggcctcgaatacgtgcgtcaactcgccgccaacaaagacaacacagtcctggctattgtgcgcaatcccgagtcgcaaggaatttctgagcttgccaccagacatcccaatgtccatgctattaagggcgacgtcacagacccaaagtccattctcgatgccgcttcggccgcagctgccatcacaggcgggaagcttgatgttctcatccacaactcgaacgccgttgatatggctaccatgggcctcaatccgtcccaaattcccttcgacgctgaagccactcggaagattttttagccatcgcttagcacaggggtttatggaggtctatgggcgaccaatgccttccttcccctgatcgagaagggcacccagaagaagattgtacatatctccagcgccatggcggacttggatctcatcatcaagtcaggagtcagctacgctgtcgcgtactccgtctcgaaagctggaatgaatgtgcaagttgccaagtacgcagcggagcttgcgcctaaaggaatcaaggtgcttgctttgagccctggatgggttgatacgtgggaaggcggtaaggagtcatatatgccactgcattagagataaaatctaacagccttgcaacagagaaaccggccgaattaattcaagcgcttgccggtatgctgtcgcagtttcaggcagtggagccaggactcacggggcaaatccagcccgaggaaagtgttcgaaagggtcttcaagtaattgagaagctggatggtgaatctagcggcttgttcttgagtcagaatggaaaccagacaaactggttctgagcactgatgagctgtatcagtggatgtacagtcatattcgaaatcagttttatctccaccctcttgtgacttgattcccgaaccctaactccagacacgctgatctacattctgtcgatccccaattccaagaatagagattttattttacatgacgcgggtgggaccccatgtacggagtatattacaagacagaaatccaaccaagatatacaggtggtctaaacctcgatgtagcaaattgatgctacaatggcttatactggaattctggaaacctctagacaaagcaattcagctcaatttagtatgctaagtcaatatacatctcccaccggcatggaaagacatcggtttactccgccggtccctcgatgtttctctcctttatggaggaggtcttgtgggtgtgcaagttctctatcgtatagcgtgtctcctcatctgacgaactgcggccccccaggatttcacgaacgagtccgacgctcatgctggttctggattgcgggcctattggactttgttagacagtggttcatttggacatgcatataaagggtgcatcataccgccgaccggcttgtaattgaccttgtctccttctttgaaatgaggcattgctgttggttgcaggcgtgtggaattggatattccgagaacatgtattgggttgtacaaatttgcgtgaacaggtagagtcttccgtatttgcagacagaaagagtgcaacagtcaaccgaaactgtcattatatttatattggctcatgatggggaaaggagttccgctatcgtcatattgaggtaactggagaaacgagctgactgggttggaattgatggctatatgaacatctagatccattgcggaggtaggctccgtggaaacgacagcacccgaatctgataacgcacttcaatcagaagtatgtcatttgtttataattttttaggaccaatgccagaacttgtctatcttgtctccgctgtagccaatcatgtgcataagggagcgcatccacaaaagggtatacaaacaataagaacgctagatgaagagcaaaatgaattaaagtattaaattggacccaacaagcccatataagaacagaggggatatcatagaagtgaagataaacaatggtaaacgcaacgagataacgaggccaacaaaagaaaaacaaaaacaaaaagcccaaatgctgcatggtcttgtcatcagaacacggacatgaagagaaaagagaaaacacttgagaatgcgagatgttgtacatcgaagctgctctatgagcgcctctcgaaatcacagcagtgtatcttatttctggggctgggtcttgacattgtttgagagccaggcctagtaagaaatagcatggttagattgacgtttccaaagagataggtcagcgatacgacttacaagaccctcgaaaatacctgttccatctgttgcaacactgggcgcaacgtaccacaacttgtccttgagcttagtcaattgaagctgctgagtaacttcctccgggcttaagtctaggggtgggtcagcggacatattcatcggattccagagacaggagatacgcacggccaggaacatcttgcttgttggcgaataccagaagcagagcatccttcatttcacggtcgttgataatcttgtgcagttccgagcgagcctcctccacgcgtgctgtatcgctggagtcaaccacgaagatcaatccttgtgtaccggaatagtagtgtctccagagcggtcggatcttgtcctgaccaccgacatcccaaacgttgaacttgacgttcttataggtcacgctctcgacattgaatccgacggtaggaatagtagtcacgtcctggttgctgagtttaagtttgtatagaattgctgaagaaatgttagccaatcgtgtccggggtctctatctaaggaggaatcgtactagtttttccagcagcatccaagcccaacatgagaatacgcatttccttggtaccgaagatctttcccatcatcttagagacttgtccacccatttttgcgggatttgacgcggtgtcgggcgtgctcaggagctgtttggcggaatatcaacaattgcgacccgccttgtgtattgcgggtttcgaatagagattgaaaggcaccggacgtttccgtgcaaagtggcttcgattgagatgacttcgtcaacgaaaggacaggaaaaggagaaaagtaggtgtgttggtgcgtgaagaccttcaatccaatttccctgaggcgggggaacctagaaaaggggcttgggctgagcttactcatcatctcctctccacgaggtccacgggggcagtttcatcctctcggctttggtttcatgtatatcaaatcattctcgaacttgtttcattcatgattatacccattccatggacaatatattcagatatctatcaaaacacttcgatgtcattaaatcgtaagaaccgtggttgtgatcttcctcatccacggcggtattactccgacagtatatatatcttccctttccttcatcaagcactaattgcgaacaaatgtcatttgatcaggatataatgccaattctaacaatcaaaggccttcttaagcgcctatttaacctaatcaacacgcacctccgccatatatagcagcatgcatctgatatcggagcctctaggtatatactggcctatctccccaacaaatacattggcggtttggccgagtggtctaaggggattgactagaagttctagaaatcaaatctgttcgtcggcgcatgcagctgtctttgtttctttttctttagctttctcgagatagaatcggaactaacggtttcctaaatatagtgcagcatgtcacctcgcttataagatacttcgtactcgatgacaattacacttctactatttatgtacacatccgagtattctataaggtaaccatggataggtttgaaatagttcgagaaggtgaattggcgttacgtcatgattaaatgaagtcattcgtcaacttcatggacatggctgatagctacttctttgattatttcttggataaattcagttgcttagaatttctaagaatcatgcccggcgaaggacaatcgttcgaacgccatgcctcagtcacacagcagcgtcgactcgcgctacagtacaagcgtaacgcttggttagggccaccgtcggatgtatgaatgtctccgaagtagcagtaaaagccacttctcgaaattctcaatactaataggaatactaggctatctacgctggtatctctagcaactttcatgattaccatacgtcaactatagcgatcgcaatccgcgataccacatatttactagacttcctccagaagcagttctcacccgatcaagcctctacagaggaggccaccgacttcatcatttccgagctgaaggcatattctatgaatcatctggagaaaattattgggatagcaatgcctgaacatgttgcaaatcactgcactcgactgtgccctcgcctttgggcggagctcgacatcattcccttggtcttgtcgaacgcaacactaatagacagagtcaacatcggacaggttagcgagacccgagacccgggatctaatggatggagtgagaagacgatcgacgagcaggctgaatccatggcgcgaaaaggtgttaggttagttggtcccgctcaatgccataaaggagccattgggtctaagtgcgcgcaggctatttggaccggacaacatgcccctgctacaagtgggcttcttcgggcttgtggaagtagacacagcctaccatgtgcaaatggcggatctgagcgattttcagaaaaccgtctcggatagaacttggtccgcgatgcagcactatgccaatgaattgaaagaacgcaataccaaagtggcatttttcagctccacgcctcagggtggtggtgtggctttgatgcggcatgctctcttgcgattttcacattgtctgggtaccaacattaaatggtgtgtctgtgccggtatctgtgtcttgaaatatgaagcctaactcaattattgtaggtacgtcccgaaaccacgcccgggcgtcttccgagtgaccaaaacaaaccacaatatcctgcaaggtgtcgccgatcaagatgaccgcttaacaccagagaacaagaaactcctgacggagtggattgaggagaataccaggcgatactggacccgaccaggcggacctttactttcaccagcagagggcggcgcagatgtcgtaatcgtcgacgatccccagatgccaggcatcattcccatcgcaaagagactagctccaaatcgaccagttatatttcgaagccacattcaaattcgaagtgacctggttgcaatatctggctctccacaggcagaggcctgggaatacctgtgggatagtattaaacaagcagactgttttatcagtcaccctgtgagcgcattcgtgccacggaatgtgcccccagagatagtaggctatatgcctgcatcaactgactggtaagggccgaagtccgataatctgcttgcatctgtcatctcactgaccgggacataggctggatgggctgaacaaaaccatgcgcgactgggacatcgcgtactatggccgcatcttcaatacaggctgtcacaactcggatatgccaactatccaatggcccgagggttagtacctgaaccagaactagttatgatgatcacattccacggtgaaagctaacacgaggatagactcatatatcgtccagatcgcgcggttcgacccgtcaaaaggcatcgtggatgtgttagtttcgtacgagaaattttacaacaaactagtagccgaagcgcctgatatgcaccctcccaaactagtgatttgtggagaccgctcagtagatgatcccgacggagggcggatctacgacgatgtagtcgactacctggacaaaagagtcccagatatccgccatctgatctgcgcgatgcgggtgcggccctgcgaccgaatcctgaacgccattctctccaaggcgactatcgcactgcaactatctacatccgaaggtttcgaggtaaaagtctccgaggcaatccacaaaggcaaaccagtaatcgccacgcgtgccggcggcatcccgttgcaggtgacgcacgggaagaatgggttcttggttgatgttggcgataccgatgctgtggcgcagcgcttgtttgagctctggacaaatcacgatctgtatacccgcatgtcggaatacggcatgcaaaatgtaagtgatgaagtgagtaccgtgggaaatgctctcgcctggctctatctctcttcgaagttgccgtatggacctgttctgcccaatggacgttggatcgaggatatggcgtttgaagagattggtctccctaacaagaacgacgatttgcggctcaaacgcgcagtccaggtggagaatatgggttagttgtacttttttgtttgactctccttcattagcagttgccagtatgtatatacagacaaaatccgaccatctaccacggggatacttaattagtacacagatcgatacatcaaaacacaacattgaaagtagcatgggggtatcataaaaccagaaaaagaaaccaaaacaaacccaccaacccctcaaggccgtccaacaacccgatacctctccctagccatacctccctccgccccctcaacaccatatccctccccaacctccccgacaatcctcgccggtctcccaccaacaatacaccaactcggcaccaccattccaggcgggacaaccgcgccatcgagcacataagcatagtccttaataatagccatactgcctatagcagcacccttcccaacatgaacatgattcccgagcgacgcagcctccacaaccgcgccctcgccgacaaaaacatgatcgccgatcttgagcgggtagaacgagtatatgccgcggtgtagccggctcggcgggcgcaggatcgcgctcttggagatgtagctgtatcgcccgaccgttatcgctacgctgggcgtgctcgggctcgaggctgctggcgcggaagggttgtttggatcggtgggagggggaagtgttgtcgtgcggaataggtcgccgcggattacggcttcggcttggattaccgttttgccgcccaggataatatgttgcgtcccgtggatttgagaccgtcgggagatcttgtttcctgtgtcctgattttctcggcgggttaggtaggggttcttttgttgtggggtcggttgggtggtttcaattgggagggtaagttagggggatcacttacggtctcgatgtattcgccctttgctgcctttggtggagccattttgaggaggattgaagagctttctgtcgtgggatgctgcaattgtggagttggagttgcaacaaatatagctcgaccccaggaatctagaagatgcggcagtatagccccaaggcggtgtatgtaaacaactatgacgatttcgatagaccgattgcaatgaatttcttagctattgttaagttgcactcagatgggaaaaactggaattaatgagatattcatgaaatatacactacgctgctgtcattaaagcttcaacaacctccggatatcctgtcaaccaaacagttcgtcgaaaataaaacagtcaataaaaaaaaggcatacaatcatagccaacccaaagtaaattacccccacatggcatgtccgcaattttatatacgatgcttcaactgacaaacccaaaagaaacctctcaggaagatgtagtcttcttcttctgctccaaaggaccatcccagtgcagcttaagcgacatggggaaggcactgtaagcacttccgtcaccgcggaggtaaaaggagtagccaccttcctggggaaccttcttaatctggccctgggcaccggcagcacggcggagaccctgcagacgaccgacgacacgcagcatagcaacgagcgcgattttggtgatctgctcgccgaaatcggtggtaggaccctgaccgtggttgagatatgagccaagagggcggtcaaggttgacctggttgggctcggggaatacgctggggtcgtggttggcttcgtcgaaggaggcgaatacttgctgcccgggctggatggtgtaagttttgccgtggtccacgacggtcacactttgcttggcctcgcgcaaggcgccaaaggtgccgttcaggcgaatagcctccagacagtagcggtacagcttctcgtccgattcggcagaatcggcgttggcgaagcggttgatctcagctaggtgggccttgttctcgggcgcggtgtagaactcgatgatctgggtaaagacctgaccctggctgggaactagaccgacgatcgtcgggacgattgcagaccaggtgatttcggaagcgctggagccggcttccttcatgcggcggatagcttctgttccgaactcgcggatggcgttgtcatgcggacggaagctgttcatgatgccagagaagagaccgctgttggtgtcggccttgacggtcgcctcaacgacctggccaagctgggtagagacggcggaggcggctcggttcagagagcaagagcgaggagcgtcgacgtcgaagaagagcgcggagaagatggtggcaaggatcatgtgcatctcgtgttcggtgaataaaccctgcggattctgctcggtcttcaggggaatgccgaagagagtagatgcaaagtgaacgtgggccaggttgccgacatcgcgagtgatatcgatctggttgatcttgcccagctggccactcttttcagaaatcaaacgctcggtgatatcttcgtagaaggttttgacgagctttggaaactcctcggtgttgaaagccttgccgatagcctcgcgttgcttcgtatcgagctcgcccttgccgaagaggtcagacatggagcgggcccagctgggacggaaatctacctgattcgagatcaacagactggcactttcgtgagaggtcaggttgacacgaggctcagtgaaggcgggtttgtcccaggagtaatcctgctcacggcctagatccttcatgattttgcggttttcgctggggattgtcatggggtagtgggcataaatggagtctggcttgtagtgattagggaaggcgcgcgtggccagcttatagaagatacatccctggttgatgttgaggtcgtagcggcactcgttgtaaccccagttggttaggttacgggggttgtaatcaatagtgtagtgacggtcaccgcggacaagggcgacggcatccgacagcacagcacgggagatggtgtaggtcggggcgatgccgacaccagggatcatgggctccttggcctcctcggtgacgataccggggtatagttcaatgtaatcggggtggtcgtagagatgacggagagtattagcgatctcggggttggagttgacttcttcgaaagtctcgtaagccttcaagccgaagtgcttacggaactcgttgagagaaccgacgttccatctacgcgaagcctcgataccgaggatctcgatagagcgcatggccttgggtacgtttcggggaccgaaagagctggccacatcctcggtggcatgggtcagaatatttacaagctctccatcatcgaaatatccattttcgtcacgcttcagacgggcgaaggtacgcttggcgggatcagcatcgagcagaccctcaaccttcttcatacccataagtagctcaggcatggtgacctgctcggcaggcttgcccataaggtcgtagtaaatctgctcaatccacttctcgtcgccctggctaatggccgagtgccaacggtaggccaaattgaactcgacggagcactggttgccgagaccggaaggagtggaaccggccttctcggcctgggcacgaggatccaagcaccaggtggagttggtgcggttcaggttgacaatggtgcgcaggtaatcatacaaagtgatgttgatgtacagaccgcaagtgataagacggccggtctggaacaggtcctcatcacgcttggcccaggctttcttggtgtcctcctcggacagactaggacggggcttgctgaagcgaccattctcgttaatctcagccagctgggtaacgacatggttgtggaaacgattcagcataaccagcaaaacaccacaggcagcaggaagggcctgcagacgaccttcagagaagcaatcgggcttcaactttccgtcctggcgggagcggatcagatcctgctgctcctggatatcaccatacaaaatggacaagtcaaggtaggcagaggtcttgtttatgtgctgctggcggtagtcggtctggaagatatctatgtacgaaaacagcatattagcgcctgaattatagatttcagtggggtcgacttaccgtgaataatcaaagaggcccagtcgaagaaaacactggagaccttgttagggtgcggagtgaactcctggcgagcaaagagggtatcaaaaatcagaccggcgtcgggcaatccgctgggctggatggtcaggggagaaatggtgcggcagtatgcagtattagcagctcccagccacgggagagtagggttgttgttggagccatcggccgagcgatactggtactcgtctcccatgtaactattcacagcattagcgcgcaattgcaacacagcagtctccaaattggggatttctcacgagagaggtgggtgaggaagtgagttccatagctcatccaggaacacactggtgagctcggtgcggtttttggagttaccgggcaaatccgcgaccatctggattatgcgctccatcaagtaggtcttgtcatcaacaagttcgccggaggctttgctcaaaatcaggtctttgacagtgttggcatcgcggaatcccagtgccttgatgtcattgaacagaccggacgacttgtcgtgcttcatgtatgcgccatcactggtttggttgggcagaggctcctgcgaagcgtgaattgcttgcgcatatttctcaaatacagcaacgacctctgcacgcttcacgatgtggttgtcctccttagtagaggtggacttcgggactggcaagaccttagaggcacgcctgctgctcttgtctatgctcttgggctcgatgtcattgcaatccttgcaatccttggcttccttggattctttggagtctttagagtccttggaccgcctgaattgggtagagattctcctcaacattgtgaaaaaggaccacaaggacaagttgtgagaataaagaaaatcaaaagagagatacaaggttgctaccaagggccagataagggggaataaatcagaagctcgacggtgctctttaaaacgagctgttcaggcgacgcaagtcagctgcaggactgtggagcgtctgaaatgtggcggatttgctatcgtcaatagctgattgactgcgacagcatttgatttgatggagagcaataggacgatctcttctcgggcctagtctctgtaacaaatattccagccccgcatggtgcaagctcaattcccaattaaagtctctatagtggactctcgatgatgaggtatctcaatatagtaactgatcatcatttatgacttggtacacgaaaaaggggacatctgctcgaggtagtatgtacagaatacgcgaacaccctgcccaggtggaatcatatgattgaatatcagatataatagccatggttgcggtatgcagggcataacccggagagctgaaaggcaaatccaaatgtagatctatattgcacgcttcggaagagcggataatcgaccaatgactgtgagtgctgtaataccggactataatcagcggtgtacatcatctgtacgaggtactcctctgccacacagaagtgcagacggatctcaagatcgaaataaatcgacaccaagtggggaagattttccgcgaaaaagaaattccaatgtacttggtggctggctgtctatttcagaacttgctccaattagggttatgtgtgtaggatacatccatacttcgtaggcgtgacgcaaggtccctatggtaatgtgatagagcagcagagatgtccttggaaaaaagcaaaagaaagaaacctttcttttttctttttttcggttttcgcttgtttcgatcgtcgctggcccacctgttcatccacttactatggattttaagtgacgaacgggccgccagccagtcatcgtcgcgaattattcagaatccgatccatctcggggcatccacttcatccactttcagggtcttagttcttgtttactccgtaccccgtgtcgctcccactgtcctcgtggcgcttttcctaggtagaacgggagtttccacgcgagaatgagagaatcagagatgactccttttgaaaaagcaaagatggtcaagataggagtgatatttcaatatcatagttcgacgaaccacggaccattgcatggggccgctcccggataaccaatccatggatggataatctatgcataaatgctttagattagctaccgatttacaatgattcctctattcgcttcccttttttgggggatacgaagagaaggctggaagtcccactcttcttcccttcccttttaggtattgacaatcctttcggctgggaacagttccacgtgaaaatgacaaggttctgagtttccatattgtcagtaatcccagattcccagattgtattaggtcattataatcacaatgacacctcgagaaactttctctagtctgactttgccgaggaaaaaaattgacggttcaccagtgggtcgcggccctaggccgtgaaggaacatgaaccaatacgtatcgatcgatacgatgctatggcaagctagcgccaaagctagatccgatcgctcaagaccgaaccgatgcgccggaactctctcaataggaacgccccctctcaccccttacgcctcctgaatcaatgttgtaatattagtgaccgagtttgtgtggagaatgatcgacaataatgtcccgagcaccacctagcatcatctcctttcaaaccctcatagggccaatgattagtactgtactccgtagcaaaaagtaagatctgcacgtctcgctttggtctctcttcagctccatctcatgggaattccaaatacatacactaggtgaccaggtccgcgccgcgcaacttgcatccctcgtgcagatttttttcgagtcaagctcaggcctgtttgcaacaaactcgcatatccagcaattactgccggcacatctccattgggtaggatgcacccccgctacgacgaagtagggtttcgtgtaacctgcacctgcgggcaagtcagcgattgttgacaggaaataattccaaaaagcaagaggcccgcccatgtttgtgatgggaatgtgccaagtctgggggcccgcccgtcaaccaggtttggcttatttttcacaaactgcagcgatcggctagtgggttgtacattgttatcctgcaaaccccccttctcttagatccgatgtagggcgctgattcgtgcaatgatcctagctgtacggagtacccagctgcataagagagtcatcctaaccttgagccttccccctttctcgtatattgcctccttcagctctgactaggtgtgcctggagtcttgaaccttttttttgtctgaccgacggaatcgcgcgatcatggctgatgggtatgaaactcaaggcccgccgggcataccgaagcagtttgtgctttgctttgatggtaccggaaacaaattcgccggtgacgagtcggatagcaatgtgctcaagatctttcgcgtaagtgggaccgcgagccaagcgtgtggaccatgctaagaagtcgcagatgcttgaccgcagcaaaagccaccagtatcattactaccagccgggcattggcacatatgtgacttcgaagtcactgactagccatggccgaatccaacgtatcaagtccgcctatcaaaaggccaaggactcagcggtcggatcttcctttgacgaacatgtcatgggtgggtacaagttcctgatgcgatactattcccctggcgatgatatcttcttcatcggctttagtcgtggttcatacatcgcgcgatttctggcagagatgctggactatatcggtctactcgaagcaggaaacgaggagctggtccgctttgcatggaagacattcgcaaagtggcagcagcggtccaatgactcggaagaagagcgcgaagagaagaagaagctcttcacatacatgaaggccttccgtgagacgttcagtcggcctatctcgcgtatccgtttcatgggtctattcgacactgtcaacagtgtgccgcgcttcgagtccgcgtggatgcaacgtaccaagttcccctacacggcacgcagctcagccaaggtgattcgccatgccgtaggtattgacgagcgccgcgcgaagttccgccaggatttgatctctggggcgcgtccaaaggagaagaagaaacaccgccgccaccatttgcaaatgcctaagaaccatctgcacctcttccaccaggataacaaagagaagccccacgaggaggtcccagacaccgttcctgccattcgggtcaatgacaaacccgaggaggaacaacaggaagaagagaatgccgaggctgaactcaatgcatccagatatgggcccagcactggagaaacatactaccatgccgggcaccatacctcgcacacaggctcgcagcaaacctcccgcgccgggagcgaaaacgggacaacgcagcccgacacataccgcgcacgctctccccgacgcaggctcgtagtgcccaaagcgtcaacggacgatctccgctcattgcgaagcaaagagtcctttcacagtttgcactccaacaccctctcggtgcaaattcccgttctcgaggtcgattccagcgacgacgaagacgaccaagacatccacgaggtctggttccccggctgccacgcagacatcggcggcggatggacactctcgagcggcgagtcatgggcactgagtcacgcgccgctcgtgtggatgacgcaagaagcgcaaaaggccggactcgagcttgatgagcgcaagatgaaacaattccaatgtctggaagagttcgacgatgattatagctccatccgggaagagattaattcccagcggccgggccggtgcgttgcgcctgatactgataacgatgatgctttccgctctatgcccgatgataaggagcgcagtgttgcgagccgcgacttctggcatgcgctgtataccgccagtacgaagggtctgatgcatgactgcctgatgttcaaccagggtattcctaccatgtcggttatcacgtggcgcattatggaatggttaccgttccgtcgtatggatctgcagcctgatggatcgtggaagccgattagctggccattgcctcgtggtgaggtgcgggatgttccactgaatgctgagatacacgtttctgctatccggcgtatgcaggcagatcccaaataccgtcctggtaatgtgattgtcggtggtggtggtcgtggtatacgtgttgcaccggaggagtatggtattggtgagtgggtggtgttcaaacatgaaggggatttggtgcgggagacttacgtccgcaagaacatctccaagtgcaaggagggcgaggaatagactaattctggttcttccttggttcatattatatatccctttctatagtgtctaataggtaatttggagaaattgtatcaaatgctatgtgtctattcagcatatcccctctgcctggccctatacactatcggctcatacactcgtaaatagtcgcggcatatctactttggtggcaattctatagctaatgattatccttctagatatcatcaaggagaaactcttcatctcaaaagacccaaaaagaccctagaacacctactccgtatagttgtcaaacatgtgaatatgtggatatgtggatagagccggcgagggactgccatattgtgttagctatgaaatgaatcaaagaagcccgatagttaagctagaagagcaatgaggttcaagaaagcagcaaattctggactcaatacatcatcgtagagagagaggtgatgcgcaatcacaacttcggcctccccgctcatcatccctttcgaccttctgttcagaaggacaccctcatcgccagttgaatcaaacataggaagcaaccaggcagtttctggagcaatcgcagatgatatttggtgcgatcaggattttcagtgaaaatgaagttccgcttgggccatgggctcctcttatgcggtcaaccttcgtctttttcccttctcacctctttgaccttatcatattatttctcagcctccttcgtttttgcttctggcaggtccaagagtctcctcctttactctatgccatgatgcgaaggtaatactcacttacctcccctctttccctccgccccccctttttcttctttttttacacatggagacacctggagagatgcgccctcgcaaacctgggaccaacaccggggtcatccccgttgtccccgaggataaggaggacgtcatgattactttttcgctgtctgaaccatcggcatcacctcggacacgatcccctttggcccgatcgcatctccgctctcgatcactggcgggaatcccgggcatgccgtctatgacgcgcgcttattcttccccagggccggactcccagggtcgttatatcttcatcaatggccgcggggcaccagtcgatgcgaaaagatctcccctgcaaatgcgccctgacgattacagcgaccgcatgggcgccctcaacatctccgaaaccatctccgagaacgcagaattagaaaccaatcccaaatcgtcttcacagccagcctcatctcccgtcctgatcccgcagacttttccccgtatcaatcgcctgcgtccgacttcaccccttcctttccagactcccatcagcccctccttacattccccacccattctgggctctaaatacaatgagtcttaccccagccaccccgggtctgtttcgtccatctccgtcccctcaactccgaccagcctgcgctcccgaagccccagcatttcgtcactggaaacaatccccgacatccccgacgctgagaatgaggcccttgaagaggatcggatcgcggagctgaaagccgcagctgatgcggcggacgcggcaagtactgccaaccgacggcgcggggcatccgatgcacccagttcattcactacaatgcgggggggatcgggcggatatgcaactcggagcgagaagcgcaagcgatggagtgtctgtggtgccgagcgacggcaggatctcgacctagagaccatttgggaggattgaagggtgtttcccagtctcaaacgagtccaaccgacctgcgcgccttgtctactacgaccaagtactacctgcgctcccacattgtttcatagtggagttgatctccacaacttcttatctttgctttactcggtggcgctttgctccgttctctgactttccttgatacccttacattacctccaactcgtacctttcatttgcagtcctgtttaccatttcaaaaagcgcgttcgtcatggagttctacggcagtggcggtggtacgtacgatgtacccgcttttagcggcttagcatgttcgactcggcccatccattgttttattatgctggtcataactccgtccttttctgtttttgcggtgccttcatttcctggcatctgtgatgtgatgtcttcattgcttcaatacaattgagccttttccagaataatctatcctgttccgagtaaatccattgtaaccactacgatgtagctggcattgataaggacatccaggtgttgataacgggaactaatcatccgagcacccaatgacatgcaaagaatcttcacttgatcgtcaaaccttcatattcaccgacctcatttccaggtgcatcagccgcatatcctaagttgcttccggaatggctccgagtccgcacatcggcatcatcggcgcagggatttcaggcctccggtgcgccgacatcctcatccaaaatggagcccaagtaacaatcctagaagcaagagatcgcattggtggcagagtatgtcttccttatacccggcacaactgcaagaggccaagtagttctttaactttcttatcggctaggtgcaccaatcaacagttggagaccatatcgtggatatgtatgtacacgtacatgactatgacttggaaagtatgcagctaatgctcaaatcagaggccccaattggattcatggcgcgggggagaaccccatcatgaccatagcggaagaaacggggtctgtcatgtatgatcccgaaggtggagcgcatatctcctactcgcgagacggccaccctatcaacgacgaagtgagcgctaaagtccaggactttgtatggaccactatagcagaagccttcaaatacagcaatcaccatggagaaagcatccccgtcgagcaaagtctattcgatttcttctgcgatcgagtccagcaaaccaaattctcagatgaagagaaacagctttgtctcgatgcctgtaggctttggggtgcatatgtcggtgatcaagtcgacaggcagagcttgaaatttttccgtctggaggaatgcgtggacgggagtatgtacctttagcaaaatagcccggagacgtatagcagagtttctaacatcatcaagttaacttcatcgtggcatctacatacaagcgcattctagagcacatcgccgaaaccgccactgcaaaagccgacatccgcctcaatgaacctgtcacaagcatcaaagcaccacctcacaacaaccaatcaccaacaaagcaccgagtaaccgtaacaacagccacaggaacaaactacaatttcgacgaagtagtcataacctgcccactgggctggctcaagcaaaacacctcagcattcacaccggctctcccgccccgtctcgaacaagcaatcaacaacatctcatacggccgactggaaaaagtctacgtgacattcccgcgtgccttctggcacacccaaaacaccagcacctcaacaactcaaacgcaaactcagaataccgtcttcgcccaattcctcgaaccatcctactacacccaccacccagcacacatagaatggaaccaagaatgcgtctcgctcgcctcgttcccagaaccacacgcccatcccacccttctcttctacacgtacggcgacagcggcgcagagatagtaaaccgcatttcggagcaagcgccctcgtcgcccgaatacagggaatctcttatcgacgtaatgcagcccttttactcccggctccccgggtacagcgcggagaacccggattgtgtgcccgtggcgcttcttgctacgcaatggcagaaggatgtctttgctgggaatgggtcgtattgtaatttccaggttggggttgaggaggcagatgtggatgttgaggttcttaggtctggggatgggattggtccggttaggtgtctttggtttgctggggagcatacggcgccgtttgttgcgcttgggactaccactggtgcgttctggagtggggagagggttgcgagattggtttgtcaggggcttgggattggggaggttggtgggatgggggttaaggatgattctttgccttctgctggggatgtgtcttgatcagaaggaagggttgtatggaaactgatacatgaggaattgataaatatttagacattggtattatgacagatggttcttgtttgaagaactatatcctgggaacaatggtgatagagagataccgtacgtgtctaaaaaccgcgaggtgtgtcgattatacaatggactcagcaagttgaacattttcattcatacttaaataatatatttcagttcgttggattcgttcaaggattagtatctttctcgggagcttttcacatttgttcagtgaagcccccatcaatagcaggccaggaggaccaaccaagtccaccgagtaaaacaccatagaggaaagataaagaaccatgtagatccatatgcataagaaatgcagggaaagaaaaagagaacagggcccgaataaaagtatataatggacagggttcacgtgacagtggcaaaagaccgcctgcaagcacatcatgaacacagcaaggagaagtacagggctccgaacaaaggaaaatgagtatcacaaaggaaatgaaaaataaacggataggcaatggcgcttcagaatgtcaatgtatcaatcatgcatcccttcaaggtcatcgccaggccccctggctcagcgacaggagaccctgcacacagtccaggtcatcttcttgactatccccggtgccaccagccatgaaagccgatacttctgcactgagttctggcggggctttgccctgtgagccggcctggagtgcccgattgcgtttgccgttggccgagatgccgagaccgcgattacggttagcatcacggaggaccggtcgtgggatgtgtgaagtgttgcggcgacgaatatttgtcgatcgtgttcctggaacccagttctccttgtcagagtcaccgaggtcttgctccagatccggtttgccagacttggaaaatagaggcttcgagagcttggatgggttcacgttcgctttgtttcggcctgtttctaatcgccccagagatgaaacagcgcgggcgagttttcgcctcttctctcccatggactgagagattggcgtatttggctcgccgtgagcagcgaggctgtgccgccctgaggcactccgaggtaatgagcgctggctgcgagattggaaaagacccggagaaccgttcggcccgctggtcggtgttgatagggcacttcttgcgtccgtgtcacagaaagattcccagttacgtggatcgcgagagcgaccgaaagcacgatctttctcggtcacacctgcccgcggcgtggctgggaagacggcactgctgctacgttgcaggcttgtcatctttgttcggcgaactgagaacatcgccacacggttcttagacggtgatggttcgttctctccgcggattactgcctttccatccgatgacatcgcgatacgtaaggcgttgcggcccttgggcggagacggcgttagctcgtcctctttgtgtaccaaagcctctccatcaaacgacatcgacaaacgcagcgatgggggtgacttggtaggtgtggtttgtgtgttttgtgtgttttgtgtgggttttgtggttgctgcctgctcattttctccctcgcctcggatatccgacactgaacgtttcctcttcggtatctgcagaagagggtcttctgagggatcattcaccagttgggaaaactcttcctgtgtggtgggcggagtttctccagcagcctctgttgccacgcttgtctgagtgctctggggcagctcatgttcatctttatcttcagtcactgggtccgaatcgtctgaaaactgcaacagtcccccgtgccatggttttgatgccatttcctcgcggtggtcgttgatgtcaaattgctctgccccacttgaagatcccggctccgtcgacgcgttatcatcactcgaaggttgacctgatgaatcgaccctacccgagcgcggggcgagtaattcgtgaggttggaggggtttggatttccgacggtcgttctggcggcgattttggaaccaaatctgtgagccagttagaagttgtttttgtgtgtgaactcttggcatcacatacttggacctctttctcgccgagtgagacgcggctcacgatactcgtgcgggctgccttgtctggtttgggattttgctggtattcggattcaaggattgcgtgatcctccggactgcaaaatagttcacaatcgggttaattgacgcgttcatagtatggacagttatgatagcgtacctagttcgacgtcgcttctggcgggctagcagtttattgtcgacacgaggagggaggttctgtgtgagggttttttgcgaatgaacgagaaaagcgtagttaagaggattggagtcggtggccgggagagagggcgaagatgagatcgccaccgaaggctccgggtcagacatgatacctaagagagcatggaggggttgggaggataaagagaaagaagcaagaacacccaatcacccaatcacccgatcaaataaataaaaaacgaggcactgaagatggaaaagccgtgaggctggtatgcagaaaaaggtatcaaatcgcgtcgcggtgtggacgcggagtagaaagaacgtggcccgcgctagtagcaaagtgctcctccgaggtacttggtacttggagacacggatctctccctgattcgatttgatcctgatcctttcaagtctaaatttcctatctctctgactcctcggaatgttcaatttgcattttgtctacatttgacgcgttgggctgtagtggtttaggcccacacttggactaaactatacagtctgtgtgaagcgcaaagcgtgtcctcgcgtttgatacaggcatatttgaaatcctccagagtgctccgattaaacaaccgagggttaaaccattccattggccttgattgccttatttgccttctttcgcctgatctgcccgtgagcgcccaacgcgtggtaacgcgccctcacgtgaccccacgaggaagacttgcacgtggtggaatgtgatctctccgatgattttgggaaacgtggaatgtcaatatgtttggaatatgtttagaaaagagatcccatctcttgtgttcgtagatgcacgacgagagggcatttatggctcccaattgtaacacccttagtgcatagtgggtcaccggtgaggtccccatctaagaaaagcaaagagcttcaaatgttggtctacagccaatagcctaatagcctgcttagcaggagttgccgactggaattctcggatctgagtgtaagccagtttggggacaatcacttcttctatggcattggtcgtgtttttcttatatattcggtctcctagttaactatgttgtacaacatacaagattgactaagtatagaccgcttcaaccaccaattcgccatccaattaggagcattcctatgtctgatcggcatgcaatcttatgaatagtcggagcccctaaatagtcacatcaggctgcacccgatatatgctggctatgtcatcggtctgttgtccatgtcccactctaataagccgagtgtgcagaccaagaccagaagtgttgatttgctcattggttgacgcacgctaagcaagccaagggaagaagcgagaataccgcgtatgcatgacatcaactagaaatgcaactgctagacagggagagagtatatatttgaatgtgcaggtctgctaataagcacatacattaaagctaaacgaatgcgacttctgagaaactctattgcttcgaccaaagcctagtatacaagtacatgtttcacatagctatctgaccatgtaaggtactctttttatatgtccttctcactggtcatcttgtgttcactatataccatcacagccatacgatgcctatctagtagaccagtatatccctttcgctctgtcatcatctaatcatggggactttctcactaacttggcaatcgacgtacggactgggctgtaactactgtctagtgtttattgaccttacattctgctcgctcatagtatccatgattctaattaggttagatctagacccgaatagtcccggggtaaaataaagtaggagtctagaataccagaaaagagtcaatactccagctagaatcttcgaagaatgtgtccatcacattaatacaacccttgcaatgataaagtagggagtaggacagtagaggctagtcgtcttggctgtaaatcagtgttactagcattattcccagaccaatctcgaaagaatagcataccaatattaggcaaataccaagtaataagaaggcatctggttatattccaagtatctcgatgaaccccatgatcaccaaaaggacaatccagccgatcaacattccgcccccgggctatcccttccatctcccagtgttgattggttcgatacaaagctgctcaatgcctaaataagacaatcaggccaagaggaaaacaaccgcccatcgtacgataatccacgtcttttccccgctttgacgcttggacatgggatagcatccccagatcaatgcatcttccctgtcattactgcaactcttactttggcctcttttttggattttgaggtccttttctacctctggactcatttcttcgtatcctgactggtgtcggctctttgtttctttttctttaagaaatatagtgctataacaccatcagactctctggcccggcacggcgaccgggctgtgacacccacttttagcttgtgatcactggcacttcggaaccaaagctttttgaatccaatcttctatttcgcttccgaccttggtcactatcacacccatctcatcgacccgactctgaccgttcgtgcaacaaagaatcttgaactcggagagatggctgaagacgcgaaactgaagaagaaccatatggcgatagtcttgggcatcggacttggagtggtgctgcttatcgcacttagtttgatgtgagttagattcgatttttgcatcttagtgtatgctatctcttgtgtctcctccgtcctttccccattctcaccgatacatttcctccgtcggttgtgacttgttacataaaccatgccactccattccacgctaaccgtgtcattcagtctgacaatactcatcaaccgccgggacaggcagtcattcttgagatcaaggaaaaatcctactgagcggttgcgcaagttggacaaggtctcgccaacttgtaccctcgagaagtggtgggcgaccacgaaggggaatctcggactgtccgaggccgtcgatggacagttcgtttggtatgtctaccttgctttgccggtagaacagtcgctgacattctgttcagcgccgtttgtttggagcaggtagaccgcacgcaggagatccgcgacctgcggtgcttgcacgtttttcaccgggaatgcctggagaagtggttcttgggtgaccatttcaattgcccgctgtgtcatcgcgcatactatgtggcagacacacctccccgcacagattatctgtggatggtatgaccagataccagccaatgattggaagggagggagaatacaataacgatgtgatgaataaatctttgcctctaaatcatctccacaataattcaatgaccaaggtttatggcgcaaggccctcggtaaggggcatataatccggattgaagtcccagatcgtattgtagtttgaccaattgaggaagttgtcgaggccggttgtcacatcgtccaccacatgctgctgcacaggctctggatcgagtagctgatcaaggatgcgagacagctttttctcggcttgtttgcaggtatgatagttgccgtgaccagggcctgcgacccacgataggaaagaaataaacacgctgaggttgcggatcagctcagcacgtgggagaggaacagcgtgtggaccggactcatgcgattggcgcaggagttcaaggagaaggacgctggcggaagggacaccgtacgtgaggacctgaatttattagtagatgtctatgaatggcaaaaatggatgacatacgatccaagaaaaatgccggtctagatcgaccattggggttcggaacgaattaatctgaatgacaatagctagcacccgacgagatacatcgcaaagatccgcctgtccggtgtttgtgtttttgacgactgcacgatagagtaagaatgaagtgtatagataatccaaatagaaatagacaatggtaagccacccatcatggaaatggtcgttcgatcgccggtcatatcgaagctgatccggagatgactgccatatggcgcgagatttctcttggatttctctgtcataaagtcagcactaggaaaacacgtaaattggaaaagacatactcggatttctgaattaaatcatgttgctcgcgagtccccagtacaacctcaagagtttcctcccgaatgatagctagctgatagcgtaggcgagttggggttactaggtgtaacctcccttgactgttccatccggcgctgtttagctccgaaatagcattgctgaggacatctccgcctgcaaccaggacttcgtcgcttagatccaatggagcatcgagtgtgcagaatcgaccattcatcagtggcggccgcccaacaaatgttgctatcatcttgtccatgcagaaggaagcaacgaagcagcgcctccgccactggcgaagaaagaatgggcaattctcaatgcaattagtctctaagtgtagcccagctgcataaatcgtggataccaggtcacctaatcgacgccatgcttgatagcctaacagcggtcagtaaatcgataggacatgagatcctacagaaaggtaaagccttactggaatcaccatattgttgtgttcgcaacatagcatcattgaattgcaacattgccagcaattcgtttgcagacgatgtctggtcacagaaaccaaggcataccgtacttatcacagtcacctgctctagtaaccggtctttcgctcgaggctcatccgagccccgcgtaatgtcagggtcattgtctggcgtaatggccaattgcattccgcaaagagcgaagatagacccgagtgcctcccagcggaggttgcgaccggtaaaagaggaacagtactcctcgactgacatagacttgtgagtccgcatcgggcgggaggtattttgaaatatttgattcgccaaatcttgtagttgtgccgtcggatcactggagaacccgtcaaatatatcgcgcactgaacgcagaagttcgtctattacgatcttaggcacgacggtgttgttccatgtccgaccatagaaccgagcaatcagcatatcacacacagtgagattatacaaaaaccgcagtacatcaaccccggattgaagtcgatcgggttccactatcaaccccgcagaggaatctgtgctctcttcgggctcgaacgaaatctcactgcgatgctcagtcaaaaccgcagagtagcttgtcgatcccagatatccaggaagagctgcgggtggctccaatggcgtgaagaagcgcccattacccagtgagcccgagcctgggctagaagcactgtttctacatattagtatgggcctatcatccgttgcaggagatgcttactttgaagttggttgactggtcagtcgactagaaactatcgcaggattgactgaatcggaaggtctccgtctagtcatcggggctggatgataaaagcatttgtcgctgattctttttgcggtgcatcggcgacaaaccggccggtcatggtcacatcgctgtttggatctccgacagggttcacacgactgcaaggtgccgtttttgcgcgttgcgggcgatgcagagcgccgatcgtcgtttctcatggctcgagaaacaacgcatagaggtatatatgatcgatgaaagaaagacctcgggaaatatgatacccgcgatgtttgcctcgtccaaattaggtttagcgtgccacatctaggaggtcaaagtataagaaacgagaaggtcagtacaattcaatatggaagcttgcagatatatatatttttattggggctgcatgtttcgcggagggttatattaatcactggaactggaacccttcttggcacgatataggaccttcactgacggcctgcaagttccttcctcaaaaaatcgtctattatctatatgtcccaaggctttctgttttcctcgttcgtagactggagatgataagttacttgactgagacgtcgaactgtacaatcagacttatcctaactttcacttgagcccattatgcttcaaagctataaatgagtattggaagtagaaaagtcgaagagtttcaatattaagacttgctgaagattcataagctgaagtaactacctatgagttatctagataaaatctaaccaatctaaccaatctaatccccggtcaaccacttatgcagcgtggaggtaaatcttcttgtttcgatataagacatgagtcaacaatagccccaatctcggaattgtcggcaggccaatttccgctcaagagttgaaaatactcgaagtacatgtttattctgctttcggcacatgctgctcagccccatctgttgacaacggcttagtttccttctctagctccgagcccacagatgattgaacgtcatctgtggctagctggtggtcgagccgagctttttcctcatctgtggcgccggtgaggtcaaaagcaacctcctcgccgaaatttttggcgatttcctctagggtgagaccagcagtctcggggaagaagaagtagatgactgcagtttttgttagcgaaattttagttgacgggtcgatttgatattattgggaacacataccgggaatgaagaatgcagaccagcaaataatgacaagataatatttccagccgacattcccgaagcccatgggggcagtttgcaggaggatgagggtggctaagtatgtcagttagaatttggaggcgaaattgtaacgaaatacttaccagcaaattgaccgaagagagaaaagcccatgccaattggtcggatttcagtcgggaagatctcggagacatagagatacatggtggtatcacagaaagtactgcaggaatgtcagctcgatatattcagcggacttgatatgttgaagtttgactcacccctggaaggccagataaaggtacatgaagaatataccaaatccatttccgaccttgtttgttgtaccagcatactgggcggtcatagcagccagacaggatgtagatacgataatgccgacaaagccagtcatgtacatgccgcgccgggagttaattttatcatggagccaggcgcccagaggattgtagatgacacctgaactaggttagctaacggtgtacacagtagaccctggatgtttatgctcaccagctgttgtcagccagacagcactcaagagcaggggcatgccaccctccatgcccaagtttttgtatagaagaacagcgtaattgttctggccgttgtcagtcggatatacttctctgtcggatattaccacacttacgatgatcagaggcccgccaaattcagcgccccattgggcaaggaaaccgatagccattcgctttcggtatgttttccttgtaaagacagctttccacacgctgccgtaagtagctaatctctcagcctcgagtcggatttgctcttttgtctggaagaactcttccttggcagccaagttattcgggtcatctggtgattcacggagccgttcgagaacatgctgcgcctcatcgagcttacccttcgaaatcaaccaacgaggtgaacgggggagccaaggagatcccagaagcagcaccaacgcgggcagacattgcaaggcgagagggaatctccagccaaacccagacagggggcctgttgcatagtagcaggcataccccacccatcccgaaagcatgtatccgaagaccaagaaaatggcgtggtggccgacaagccagccacggcgcagagcactcgacatctcggaaagatacatagggcagacggttacgaggataccgattccaagaccacaaatgaagcgaccagcttggaacatactaaatcttgtcagcgccagtctaaccctcgagcaggagaagcgacatacgctagtgaattcgagccggcttgaagtgctcctccaaatagagaaaagaaggcaccgaactggatgtttgcctttcggccaaagaaatcacacgaccacattataaaaagtgtaccaacagcaccaccagcactgaaaacaccatttgctgtcgagatcgcgggggtagtgattgtcgcgtatcccggttcaccctcggcgggcaggctaaagtaggcataccatcccggctggccgattgtactggagataatcgaagagcaatatccatatgtctatttgtgtcagtttagtgaatagcagagacttgaacatatctgcgagctcaccattgacccaacagccacaaaaacaataaccagcctgttataggaactggtctgagacccgaacctacccatgatagaatgttgtagtccttacaaatttcaaagaatcaagggtgtataatgaaggatatcagcatcaggtttgaatggggagaaatttcagcatgtttgtagccgacaataagtaggggggccccgttggggtgctctgtgtatggcccaccgagagttgcataaagttcgcaagaaatacaagtggcttgccgatcacggcacaaagacttttgagcctagaccctgaaattgcgtatggtcaacataccaagttaagcaacgctcgtttgtcgagtgaagttcgtttccagcatgctataccaagtacagagtacgatgtacatacatacaccctgtgagagtagtatgttgtacagaatactccgcgggggtccaattgcggagccattagagtgcggatcccgttccgaggctattgagaccttacatctccacaacggaggtgctccgtacgatgtcagggaaaagatccttgcggtccgtgctagtgtcatgcacgaagttccatttagaaaaagaacacgacatcccgggctctataaagtatactttttgttcccaactttgaatcgcagaaaccacaatagaacagcagaacagcagaacaatggcccgatctccatttgacaccccgtttgatcaactcccgaatccaaagcaggtttggctaggaaagccaggtagctatgaagagggtctagggaaattagccatccttacccctgaagtcgtcgccgcggcttccgctagcgagataagatgtggtcgacgcgtcacaatgggatgggaaatgacgaagttggattatcctaatctcaaccgtcagccatgtcaccatcagattgtgcctcttctgggaggtgtggcattcgatgacatctatactatgaacccacgtgagttgagagtgattctgcttttctcccttcattatattgactgtttgacagagcaaagtagccagtgggacggtctgcgccatttttcccagacagtacctggtcagtctgaacgtctattctacggtggaacgactagtgaggaaatcaatgatcgccaaaatgatcgaattggtcttcagcattgggctaaagagggtattgcaggtacgcatccccttcacatgaatacacgactcccctgatatgaactcacacaattgcaataggacgtggagtcttgatcgactacgccacatgggccgagaaaaaggggattaagtacaccacattctcgacccaccaagtgcgctttgccgatatccttgaaattgccaaggagaataagatcacgtttcaaaggggtgatattctgttcgtccgtgtaggagtgaccaaggagtgggacacgtccatgacagacgcccaaaaacaagcttactcggacaaccccagcccggagcatgctggggttgaagcgaccacagaggtccttcgctggctgtgggacactggattcgccgccatcgccagtgatgcaatcagttgggaggtgagcgataagaaagatagaccacaaattcccctcgatatgtggcaagccgatcaagaaactcaactgacagatccacaggtctacccaccacaatcccctgacatattcctccatgaatatgtgcttgctggatggggaatgccgatcggtaagtcgccgggacgttttacccgagttccgcaggtccattatgtatattgactcataaccaacaggggaactattcgatcttgaggcgctggcacggacctgccaggaactccaacggtggagctttttcgtggcatctgtacctttgaacatgcccggtggggtttcctcgcctccgaatgtgatggctattttctaggtccaacttgtctgcggagtacgatgtatatgtacaatatatggagtggtttgtcacatagtcaatcaagcatccggtagtcattgcgggtacctgggtaggattccctatataaaccctattgactggccggctcgtgtggtaccgcaccgttggaagtgtcaaaatttcatgctcgctcagagtgtacaaagtacgagggcaactcgggcgcgatcaaccgtcatggaaacgttgtacattatgttctagactgttcgccgaaggctcgaggccgaacggaccagcggaaaaggatctacgatggacacatcgacacggcaacaaaataatgatacgcggtagagtttcctaatagagataaaatagagagcacaacgtacggagtagtccgtacactttttgcctcgtatttttgatttccgttttcttttgggggccagggtaacttatccaaatctccaccatctgtagcggacggaccctgcgatccacaacctatacaggttccactttaattgacgaacctgcgtcttcaaaacatgccgtcgtgggtcaaaagtgacctctggaaatcatgctgtgcgcaaccacggttgatggagccgttcgggcccacttcccgtatagactaactcaattgcaagcccagaaattgtaattacaacgtgaatgccaatatgatcaagagactatgcaagcgtttgtatgcatatacatatgtattgcttgtgctgagctgctacaagcattttattggcttgatctgggcagttcatgccaggaatatatgtatgtaggtcgagttccaggtcatgtacaattacgatttgtcatttaaatgacagcatgaaagcttgaatgcacgtaaccgtgtatttgtgtgcaccgtgcaccagggtgtacatactacacactgtaggtacaatgtatccaacgtatgatcgtagtgccaaagcaagacagcagaaaaaaaaaacattttattatttacagaccttaggcatgaataagtgatcaatcctgttgtatttgtgagtagataatagagttctgctggttcttctgtttgaaacgagccgatcataggtgatcaatagcccgatttcaacaatgcagcttcgtaaaagcatgtcagtttaaaatttcaatcagggatgtctgaaccctattttctggcccttctattttctagcttcttggctgatattgcttaaaagatggggatgtcttgcgcctggccccgttactggttctaaacttacagcaatccgtgatgtcccccatgccgttgctggaacgaggctctgacaatgcgtccattgatcggagtgtgcagaactggaactacgcctgccagtcattatgtatcattggcatgatggtcttcttcggtctgcgtgtttatactcggttgttcattctcagtggattcgggaagcaggattgtgagtgaaatttttggatggaagcgtacggaacaggtaaatgctgacagcctcaatagggatatgcacagctgcctgggtaagactcctacatacatggaaagagggcaacttaggctaacagaatatctcgaacagttcctcggcatctgttactcaatcattgcactcctcagtatgtctctagtaccacaggtgacaggctatatctaacgcaaggacagtgggtcattacggaggaggcttacactggacggatgtccccgaggagaacaagattcctttccaaaaggtatacaaagcacacgaatgatgattatccagacttctgactctctagactatatacgcaacaatggtcatgtatggaccaacagcctatctcacaaaattgtgtctcctctggatcatgattcgtgtattcagtcccttccggaaatgcgtcatgtttattaaggtctttatgggaatcatgttggcctactacatcccggctgtcagcgtcaaaatccgaatctgcaaccccatcgccaaattctgggaccagagtattgacggcacatgtttcgaccaaacatcgatcattttggctgatgtcgtcgtcagtgtggtcagtgatttgatcattctcatcttgccattaccattaactttgactctgcaaatttctacaaagagaaagatgcgggttatgggtattttgggagcgggcggcctggctgttgcagccagtatcatccggttggcacttattgtcgttaccggacagtcgaaggatctttctcgtacgtttatgagaatcaatatgctagggtacgttttctcagcctatctttttgacgatgcattctaactgcgaaattcttttcagtaatgcggaagtctccatcggcgttatctgtacctgtctcccttctctctcggctctcataattcgaatctaccacgaatattccagcaacaaagtaacgctcgagtccgactacaaaatgagcgcgatacgaaaccggggtacaatggatcgaagcaagaatcaaatgagtgctgtaacgacaggctcggacgaggaggtactcatgcacaatgcacaggcaaatccgaagttcgagacaatcatccacggcaatagtgagaaaggaggtccgccgaaatcgacattcagtggcataggagtgacccgatctgttgatgtgtcaacctccgtggagcctcggtgattctgagtgatacaaagaacgatgtcaatctcgttttagacgataaaccctgcaaactatgacgctgggtcgatacatcctttatatatttaatgatatatctcattttcctttgtgattaatatacggttcttgctgggaagaagccgagtcctgcattatgcctttcgccgtcggtccgatgcagatccaatcaaagagcccagaatcaactaggggactggcctagatatgcagactgccgtaaggagtagaataattcgaactcgttgaccggcatggtccagaaccccctgaattcacctgtcccatatcccatcagtgatagccccctctgattctatggcatcaatatcacaggtccttgcactacattcatatatatctatacatctttcctgttagttaggtatctatagaacaagaacactatgacaggtactacacgggctttgggaatactgcatacgtacctttgcttatgtcggtacccgtggacatatagaaccctcaatgtcctcaattgtataagaaagagataacagatgtacaaaccatggctagaatttctctttaaacatacatttcacttcattcgaagctatttcacgcaatgtaatgatacctctgggagtcttcttgagacatggattaattgcaccacgtcatgactccagtctccaccctcaaacatctagatatttattttgtacacaatcaatccttctgctcatctctccattagatgtatatactcaaaatgcctccctccgtgtctttctctcatcttccagtcgaagtcatctacttaattgttgatctcctcgagccagcacgttacctcaactcgttggcgcagacatgttcgcggctatatctgctcttgaccccaatgctctatcaaaacagcactcgttcatcacacgggttccccattgtatgggcagcacagcatagctccgaagggaccattcgccaagcatttgacgctggagcttccacatattcatgtcattacaactttcaacaatcgctcgtcgcggcagtgaacaacaaccatgagaccatcgtccgactgatactggaacaaaatgaagaccctagtatattcacagaaaagcagagctgcaagctgtgcaaaggccagaaatccgaggccgccgcctcaaaagttctcaatccactatatgcggcggcagtgcgtggcaacgtggccattgtcaggctcctgcttgcctataagatcactttcgaacatggttgcggagaacgtactccgatatgctccgatatcgtatttgcggcagtaaacagcggacacctagccgttatgcaagttctcatcgaggctggctacgcctgggacgacaaaagaagaagataccaggataagacaccactcactgttgcagtcaatcagggtgatgcaagaatggttgaatacttgctggacaaaggggccaaaccctcgcgtgatgataagccacttcttgagtctgccgcggaaaatggacaccttgaaacggtcaaattgctcctggaacgcggagcagagcctcaaggaagcgctctttcctgcgcggctggcaatggccatgtggaggtcgtggaagtgctcttagaccatggggcggatcccgatcctgatatggttcgagattgtctgagtacactctactatgtagctgtaagtggtcagctacaaatccttgatcttctgttggcacgtggggtgaacatataccccaaggacccaaaggaaaaacgctacttgttatcatccataatcgaagatgaactctggcgatcagttgagaggcagaagcggtctgctttcgctgtttcctttcgagccctcgccgattttgagaacatgatagaccacggagatgacctagcacaagctgagattctgtacatagctattggctatgggtgggatgatattgtgcagcgtgttctggagcagagcttttccgcagatggaatatatcagcactgtaagctccggtataacaggcctatactccaagccattcagaacggtgatattggaattaccagactcttggttgagcatggtgccaatatacaggagtaccagggagaaagcaaggatgaaggcgcgctatccttggcaatccaattgggcaatgtaaaaattgcagagcttttgatcgaccacggggctgatgtaaattgcataagcagccgcggagaaactgctttggcagaggcgacggcattggcgtccgaagacatatttcgcatgttgcttgatcgaggagctgatcctaaaatacctttactatccggtcgccaatctttgatagtgactgcaccatattctccagccactgacagtagaattaatgctacagccattcttgatatgctcttagcccatggtgctgatatcgatgaacggcggcttcctagcattacacccttatatcgggtcatcttggatgtcaactccggaaatcagcaggtgcgactcttgctggagagaggcgcagatcccttcgcggtgcatgcttgctatcgcgcactcgttacagaggcaagcgatgacaatttcaactcaatactcagggtcaaacggtcaatgcctagtcccgatacctggcgtcccaaaaaaacgtttatatttgtgccgaatatgagcgaactgaaagatgacccattccttgcatgcatgagacggggcgataaagcgatgcttgaggccatgcttgacgcgattgatcggaaaggacttcccttggaggagttgaaggatagacttgatcgagctcggatggaagcgactgagagtgggaacctgcaccttctacccattctgcaggattattactgggtaaaaaatatccacgcaagtagctgaagatttcaaaatgacaggatgttatttgctaataaattggcttgaatgatgctgtaaacacccgctcaaaggtatattggaagaagtgctctatgcgcaatgggaaacaggcacggtcaaaatcaagagatcttcaagagatcttttcgatcctcttccttgcaatatccatcttggatttcaatctagacacctcgttagtaaagcagatcaaatcaagtggaaaacgtgagcaaaggacatagatgtaaacgaacatatcagactcctcatccgccaacctcagcagatcattctgcacctcgagctcctcattaatctgcgtgccgagttccctctgtcgaataatgatctttctcaactcatccacattatcatcctggctctgcataatctgcctctgcaactgcagcacaccatcgttgtcaagttctcgagttcgctccgtctctttgccaaggaccctacccgcccgagccggcgtcctacgcccactagacgcatctccagcggcattcccagcattcatcaaagctcctttatcttgaatggatgcgacagtatgatcaagccggctcttcgttgccatagcatgcaagagatcctccaagccgtctttttccttgcgcgcattgatgagcaggtcttttcgtcggcgtatctcgcccccaccaagactggacgatgtttgtgcctcggacatcttatctccgcgtccaagatgcttcagtccatcgtccagagtggtgatcatggtccctgcacggacaagactgcccttcgcctgtgcagagctctcatgttgcttctgtggcgttgtttcctggtctctgcgagatagctgtagtcgtgcatcgtggaggtggttcttcatgtcgcggtagtagtcgagccatagcgtcgggtccgtaatggatgcatttgtagcggctgggtctgtgatagcggtgtggagtcgggtggaggtggtggttgagccgttgcccgttgatgcgattgcggtgggaagattgaggaatgcacgccatgcgggcgaggtgcgccagcgcccatcgtcggactcgttaatcgcgcgaaggtatgcctctagcccgcggcgacggtcttcgcacaatcgttcattcgagacggttttcgaaaaccaggttttcgaaggcagaggagctggtggaggggcattcgtttgggagatgagggtgctatggaaggtcgagaagtccgagtagcgtttgggaaccgtgaaggagcggagtgggaggcggagggtgatgtggtagacggtgtacggcggggaagtatttgagagggtagtattcgggatcgctatctcaacggtaggcgccattttgattagaattggaatgaaaatgtcattgttctcaaaagtcggggtgtgagatagaatggatgtcgagcttggagtccgggcggtcataaggatgacctcctcttactccattgccacctgattcacagttgggtcggaatattcatacaagaatcttcagaccttccttggcttttaagaatagtcggccatgtttacagcctttttatcttaagaataacatgatcaagttaggttactggtggttagctgaaatccgccgaggcctagtatctcgtcgtcggttgaaattcgcaacgatcaggcactacgtatagaacacaaggcattggcacgttgtaacacgaaattaatattaagtaacattgggtatctcatacatgcaagtcaaatccatctattcccagatctctcgttcctccaaaagatcccgctggccaaagaactcaccaaccaccataatgatcatatcgagcacggcatgagtctgtatcgaccaatcgtcgtcttcttcttcttcttcttcttcttcttcccagctaccaggcgtctcgacagagtcggaattggtctgcagggaatcgttctgcagccgagctcgcaagcgcgccttggctgcttccaagtcggattcttcaagcgataatgcgtcagtctccggcaatttcgcttgcttacttcccgcttcatttggaactggaggctcacgctgagccttttccttgttctcctcgccttgaaatgtaggttccggttgagtttcctgcttggtcgcttcctcattctggactgtagatctctgctgagcttctgccttggtatctttctcatcctcgacgagatcaccctgttgggttttgtcctttgctgggcctgccacagaataatcggcctcctcctcataatcctcgttctctaactcttgcaccttgcgcaagatagtcgcagctcgtttgcccagatttcgaataacacccacctctcgggtagaaagttgtccaacctcacggcaccttcccaataggccccaagcccaagccccaatgcgccgtacgcgctgagtgtcgtcgccgcgcacaacatcagacatcatccgcgctagtatttccagtacttctaacacgctgtccatgtccatgcttgccagttggaccatacgtggttcgactgtgaccaaaagccggcgccatgttttgtgcgcagatccggcctttcggggcagactgatagggtggtcattgtcgagggtattgatagcactggcaggtggactgcattttagggtcgatcgcaagaggaggaatcgatgtcgcagaagattgttgtaggaattttgcgcttcaggatagagctcatcgagctttgaaggggaatttgcggcgttgtttgtgttctcctccacaggcgcaatgtaggcttcgtcctcgtaaaagcctggtagtagatgagggtcattcggttcaactagcgtcaaatctggttgcatatttgatgctacttttgaagggtctgtggtcggagtaggtgcagagaaaagtatcggtagtgagtttgcttcgaatctatcgagcaaaaattagttcaaacttgaatcacgacggacaagcctcgacatcattcaggcaaagcaaaagctatatagatgcaggatcaggcataccgaaccacgcgtaagtattccaatccatcgtccgggtcgttggagagtaggtcatcgcctccatcgtccaaccccgggaatgcgttcttctggccataaaggggattatgacggggatgctcataagatgccaccgaagcttcgtcgtgttcatcattttcataagttatccgaggacgtttcaacgaaggggccgacatggtgtcttttctcttgtcgggcagagtgaggtgaagatggtaggtcctgtaggatcgaaggagcttgggccaatctgcagaccggcttgaagctcttgtaacgaatatagacttgaccacctatttcctgaataagataagagactcatacgataatgaatttgtattcggcagttcctgacaatatttccagctttattctgctcattatcttactgctatcataatcctagtgaaatttgtatacaaccgagcccaaggcggtgtacaataattgcttatcgaaggcggggacctggatctgccggtaaaaaagataaggatcgtcatcggactatcttcacatctccaattatttgtgtctcaatccaccccatgtcttttttatctttccttggaactttttcccttctacttccatgctaaatcaattaataatcccacttcacttgagatgacctgtgtctttgcttctctcggaagcggttcggtctctctgttgcctcttcctcgccatcttcatccttaattgttacgaaacgccacacataatattttcgacacacggattcttcacgatatcaatttgaaaccttcttgtttgttctacttgtaaaatgctaaggcgggtcgactccatcgaagtcatgacttctccccaatgtgtttacctccctacagaggtcttaatacacatcgccaaattcatttttgatggttggaaaaataatgccgaccccccaagttatcaagtcacgcttcaaaggttttgttcggtctctcgccagtggtactctgctggcatcgaatttctctactaccgacctcaacttgacgaaggaaatagcttcttgcttttcaccaacactgtgtgcccatcgattcgctcccgaggacgaagaaaagtagacttgggttcgctagttcatgtcctgaacctcggatcattggtccaccacagctcgaatagcctaacggcacggcttctaggtcgagtgaagaagaacctgaggacttttgttgctccgaggatctctttttcgtaagtaaataatggctatcacaacataatatccaacctcaagctaattcctctccacaggatcaacagccttgcacccttagcaaaatgcaaggagctctgctatctttctctccacttagtagctgagccaatcgcgcttcctgcgatcaagaaagccattagcaatatcgacaaattgcaatcccttgagctttcatctacaactctcatcacagacgatagttccactgaagattggccgcccaatctaagatacctccaggttggcgggcaatttgttacagatagaatgtattcgttcaaatggcctcccaacttggtatcgttgacattatgtggttgtgatagtctaaacactcccatcttggaagatattctcatcaatgagcagctccgtaccacacttacgcagttgatcattcacagtgccaatagcgagatgttcaaggagggaccatctgggatcttacgcgcactcatggctttagagtctcttcgaatacccattgatctgctttacgaatttctcattcttcctgcattcgactcaagggattctccattgtcaattcgtggactggagctcacggcaccatataacgagaacttttctacagtcattgatcccgatgatatttgcaaggccctgaaaatgaatctctctcgattgtgcgctcttggtatcagcgctagctgtcttggaataatacccgaagcatcacatgccaaaatcgacaagtgtttgtggaagaatattgataagtgtcctgaggaagagcttgattctctttttgacttgggtctctatgtcatggctgagccaatgtgctaaagattcattcatacattcttatgaagtcttatatatatatgcctctctctgtatattagccgttgatgggtcatgctactgccccggcagctatctttctagcaatgtacaatagcacaacctataaaacagattgaagcgagagtactagttggacttgagaggatacatttcaaggagaataatgatgcaccgacagcgaaaatgctggctaatctgtgattgtttggttattctccctatttgattcaaataccatggtccttttctctaaagcctcgaatcaaaagcgagtgtaaaagtttgagagtggggaaatggaagttcggagggaaagatctggccggcacggtcccgggggaacctggaaatgacgtacatttccttttgtacacatttcccaggatcacgaccacaatgagatcgcaaaccctttggcggtcatttggcctattgcagcgtcaatccctctctactcataaaactgtcacccgccgagctatccaaacagctagttctcgaccgatccctaacttcgcatttgcatttgagtgagtcttgaccggcgaacacaattcactcgattttcttctcacatgctacagcattgatggcgtcctcctccgcgcatcgaaacctttgcccggtgccgccgactcgcttgctctcctgaagaaacaaggaatcccctttcttctgctcaccaacggcggcggtaaacacgagacggagcgtgtcgcggaaatcagcgagaaactaggaataccactggatgctacggacattgtgcagagtcactcaccctttgctgagctggtcaagggaccggacgagtcgagcgccctggaacacaagtgtgtgttagtggccggaggcgatggggataactgccggcgcgtggcagaacggtatatcaaggaccccttcctattgctgaatgatatatgctaattaatagtaataggtacggcttcaagaatgttgtaactccggcggatattcttatggcaaaccccgctgtctgtccgttttcgatgaacttcagcgaatattataaaacatttgcccgaccgctcccgcaccccgttgatttcaatgatgcgtcgaagactttgaagatcgatgctgtctttgtgttcaatgatcctcgtgattgggcgttggacacccaggttattatggacctcctcctctcatcgcaaggccgtctaggcactttgtctgaaaagaacggacgaatcgatcttcccaatcatgggtaccagcaggatggccagccccatctatacttttctaatccagatttgtggtgggccgccgcctaccccttgccccgtcttggtcagggcggattccgggaagcgcttgagggcgtctgggctgcggctacaggtggccccagcaagggtattgagttgaagaagaccgtgatcggcaaaccttatcaacccacctaccagttcgcagagcgtcaattgcttcggaaccggctgagaacatttggaagctctgctgaaagcacgcccctggaaagagtatatatggtcggtgataatccagagtcagatatccgaggagccaactcctatcgcagtgaaattggcagtagctggcactcgatccttgtccgcactggggtataccgtggcggagagcctgcttggatccctgagacaattgctgacaatgtacaaaaaggtgttcaatgggcactgaagaactcgaactggcctgctgcgtgattatcaagggacgctggatactctacattgatatgaagatcggcatcaacatggcgccaatctatgtttatatgtgtttgttccaaatagctaccagcaccaatccacataattacctctgaagcattttttcaacctatcatgtaataaaaaaatgtagatacaactgattaacacgcatggatgtactccgtacatatacagtcaaggtagatctgcctaagtctccacaccgcctacccctcttagggcttgatcattcggcggggtgagtcgacgaaacagttttctccgcagctctacttacaatcagcctgctgcattaactcctgcaaatttctcaggatagaaaatcattaacgtaggatccaacatacctgacctaacactttgctccctctaattgtctttgcagcaccatggccgactccgaattgccccaccgtcccaagcccgaggcccaggatgcctccgctcccgccgcggaaggtgagaccaagaacgcaagcaagaacgcactgaagaaggccgcaaaggataaggccaaggcagagaaggctgcggcgcgtgcagcgcaagaaaaggcccaggccgccgcccaggaggccaacgacacggccaaggatctatacggccctctcccagaggccgagaacgccatcccgtctacacgattcagcgaactctcagaggaacactacgagaaggaggtgacagttgtggcgcgtgtggacaatgcgcgtgtgcagagtgctaagcttgcattcttgatgctgcgccagcagggacaaaaagtgcaggccgtcattgcggccgcggagcccatctcgcgacagatgatcaagtacaccgggggcctgaacgtcaactcgattgtgcagatcaccggtattgtgaagaagcccgagattccgatctcgtctgcgtccattagccacctcgagatccacattcgcaaggtctatatgatctccgaggctgcgcagatgctccctatgcaagtcaaggatgctgagcgcccgcccccagagagcattgatgaaggtgctcaggttgatgccgagggtgctcccatcgtcaccctcaagactcgccttgataaccgggtcctcgatctgcagactgaaaccagccaggccatcacctggatttccagcggtgtctcccagctatttgctgagtacatgattaagagtggctcccggtggatctccacacctaagctggttggtgccgccacagaaggtggcagcggtgtcttcgaggtgaagtacttcaagcgcaatgcctacttggcgcagagcccccagctatacaagcagatgtgtatcgccggtgatatggagaacgtattcgagatcgcccccgtattccgtgccgaggacagcaacacccaccgccacttgactgaggtatgacctactgatatattttcccgaacaggaaaaaaagaaacagattattctgacatgacttacagttctccggtctcgatttcgagaagaccttccgcggccactaccacgaggttctggagttcgctgaagacctccttgtcttcatcctcacccagctcaaggagcgctacgcaacccagatcgccaccatccaaaagtcctaccccaaggccggcgacttcaagcttcccaaggacggtaaggcgctgcgcttgaactacatggacggtgttgcgctactgaaggaagccggtgtcgacgtctcagagcaagaacgcttcgagaacgacttctctaccgcgatggagaagcagctcggccaaatcatccgcgagaagtacgacaccgacttctacgtgctcgacaagttccccatggctgtccgtcccttctacaccaaggccgatcccgacgacaagcgcttctctaactcgtacgacttcttcatgcgtggcgaggagatcatgtctggtgcccagcgtatcaacgatatcaaggagttggaggagtctatgcgctctaagggtctcgagcctaaccaggagggcttcgaggattacctcaatgctttccgccagggttgcccccctcacgctggcggtggtcttggtctaaaccgtattgttatgttcttccttggcttgcctaacgtccgtttggcttcgctgttcccccgtgaccctcagcgtctgcgtccttgattttgcactgtgtggaattatctcatggcattacaagaagcatataaaaacaaaatcttttagctgtctttcaaacattcatacttttattttggtcgtaatatctgtggctaatttaaacaaacaattttgacccttgtctactcttaacttaaccaacggacaaggcagtgttaagaatcaagctcgcgattatacactaatgactgctacactgtgagaaacatcaagtgtatgcatgaatatgatatgatatttggatgaaaagttgcattgacaagttttgaggggtggacgacgcaatctaacgaaccaagacacatgaaaaagacacacgctcttgtccccccaaccaggattaagcacgtaacgacaaaaagaaagggagagaaagggattaagacacagaagcaatcacagcggcggcgacgccctcttcttctgcccgaacggtgatcttggtagtcacaccggccttgctggagtaggccatcttgatgagagcagcgacgcggccaccagagacggtcttgccgaacagcttgagagtgtgtgtgctgctgttgagggccacgtcggtaccctctagaggttgcagagatagcgctgagatcagttgttccgtggcatctgggatcaaaagcgtgagtatttataacatagagcaataaataggacttgtacataccgttgatacccttcatgttgctgagctgcagagtttcgctttcctcctcgccattggcgccagtctgctcccagacgtggtcgaagctgccggcgaatgtcgggatgacatagtcactgcctgtcagctcgaggtcctccacctggtactcgtcgtcgtagccactgtcctccggctcgccgcttacgggatcgatttctttgctagtgaacttgaggatgtttgtgaaggaggtgacggggacgctgttctcgccggtgagcttcttgaaagcaacgtagacaacaccaggctggtctgtgggcagcttgggggcaggaatgataaagtcttcctccaatacgtcctcttcttctggcgtggcaaccacggtgacattctcaagaatagtatccggaagtgtgttcttgatatcatattgtaccacgatgtgttccttgaaaatgtgcttgacggccgtaacaacgtattcggtttcgctctcggaaagctcgacaggcgcggaggacttgagcaaaataccgtaagccttgatatcggggtactgcagaagttgctctgcgtatttctgggtggcagaggcgctggctgcttcggccataccgccgactgccttgcccttcgggggaccggtcgaaggcgccttgagagttggagtagctgaggtaagcttcttggtcctctcctcggccagcgcctgctcgtgtgagacaaccggaatggtggcaacatcgaaggcagtagcgaatgtccccttgtcaccagacgtcacatacatgacgagctggtgttcaaacgtggaaagggaatacattgagtctataaccattagtaaaattaccattgctagtcatggacaagaccttaccgttcttaatgaaagcgctcgccgactcatcgtcttcactcatcagacgcaggttaagcgcagcacggtctcgcacctcgtcgtcggtatcatcaagacaacgggtgaggagaacatggacactagacttgacttcggggtctttctggccaacaccaaatttggccaatgcggtgacagcagcggcgcgtacgatggcgttctccaatacgacgcggttgtagatgtagcggatatactttgtaggatgggtagtcttagggccctcggaaccaagcaggtgcaggattctaaccgaaagcttggtgaactcgcaatcctcaatgaactcacagaggtgagcaagcgcatcttccttgctttccgggacaaacttgatcaaatcgaacatgctctcaacaacagtgcgcttgaactcgtatccgccctcgtcccgcaggataccactcaggaaaacgagcataccggcctgcttgctggggaacttcaaacacaaagtgcgaatagcttcgacaatagtgaccttgaactcgtcggtgatatcagccataaagcccgagatttgcttcatcaaacggtcaacgctggcttcgttgccagtcttgagcagtgtcgtaatggcgaacgttgcgattgaacggttcgagttagagataagggactcgatatcagggttgcagacattgacgacgtgtggcttgaaagaggctaagttgtgtaggatacggattgcagcgaacttggtgattgaccggggggaggacaggaagagctggagaacatgaactgcctgcgttgcctcggcatcggtgacatcgcgcatatcgcaaatagccttggccgcctcaaagttgaccatctcatgcttgtggcggagccagccatccaacatctgcatcatgggtttccggagaccttggtcctcctcggccaatttggccgccagacgtaccaacaaaaccagagcagccgggctcttcaccacacctgcagcgccgtactgttgtaccattttgaccaaagacatgcgatcgtgcgagcgcatctggtacaaaagaccgatggcgtggtactgtgtcatgaaattcgagttcgagatagcatggctctgtgagcctgagaaaccaaggaacccggtcgatgatttcgatgacgaggccgcttcctgtgtttcgctctgccacctccggacaacgtcgcgcgcaatggggaggagatggtaggaagagaccaaggccgcggaggacaccgacggggtcttgtcaacaatggcggtcttgataagtcgctcgataccctgtactgtggaacccttttgcaattgtcagcaaatcccctcaaccattgaagtcctcgcgaccgacgacctacatcgataatgcggcagagcgctctgatggcattggcccggtacaagacatcgcttcccaccgcagtgtccttcataatgatacttgtcgacatgatcacatcttcggcggtgccagctagctccttcaagatcaggtacaccatctgccgcaatgacgggtctttgttctggaagagcttggagattccgaagaagagagtggtggcttcattcgtagggaactgctccccggtgaacatgaggacagcgatcttggtgagtaacgttcggcatgttcgcggcgagataggagaggaattgaataggcgtgctaggagagttatctcgttagcattgaatatgtgcagcgcatgtaggcgccagggggtattgttcattacacaccatcttggaaaacggaggtccgatcaagcttgatcatgacctggtcctcatcttcgtttttcttcatgtaactcatattgcccagcagctggaattgcaccagcaatgagtggttgccgtcgtattagaaaggtggagttggtgcaattgggacacgggtcgagtacacagaagcagggtagggcggtgtaggtgactataacagttgcataaccacgcaggaattggaggcttaaagagggtaaatcggagaaacagacaaggatataatcggggtaaatgcggtggtagtgaatctcgaaccctcaaagctcagaagtgccagctattgacaagttgaaggtggccttccgtgtgtttggcccgaaccaaacactgcaaacaggtggcatcacgatccaaggcagcgcattcatcccctctaaaccccctcattccctttgtatttcgcttggatcgaatttaatctatacatctttgatcatttcaatccaatatgcaggttgaagttgaccctaaggaggataccgagtggtaagcatatttacttgcaatatacccccgctaccggcaaggtataacctgaaggcaatggctaacccgttgttgaatattgcataggaacgatatcctccgtcaacatggcattattcccgaaaagcccaaagaccccgaacctctgatccaagaggctctgatcgccgcacagcacagggcgcacgagaaccgactcgaggacaaggaccttgatgagctagacgcactggaggatgaggaagatgagacgtttctcgagacttaccggtaagctttgatgtaatagtaagtatacctaaaaaggttccctttgctcacggtaccaatcaaacaggcaaaagcgtctcgccgagctctccaccctccaacaaaccagcctgttcaaccaagtctacccacttcagaaagtcgattattcccgcgaggtgacagaggcatccaacaatgctttcgtcttagtcaacctcacatcgatgggcgggaatgttgaatcgcgcgtgttgacggagctctggcggcagcttgctgccaaattcggcgatatcaagttttgtgagattcgtgccgacatgtgtattgaggggtatccagagaagaacacgcccacaatcctggtatataaggataccgagatcaagaagcagcttgtcacgctccagcagttgaagggaccccggaccaagatcgaaggtaagttacgttcaaggcaggagtgaaataagaattgtatactgatcaaatgcatagatattgagcgtttgctcgtggagatcggtgctttgaaggagagtgatgtccggctgaggaagcgtgatggagaggacgactacaagaaagacgatgatctgaacgttgaagattatgatgatgattgggattgatttccttgcgattgaaaatactgcaaatgttatgatttggcttgtgtgtatgtatattatgaacatatccaaaaatgatgacccccgttctacgtcgacaggagccaagagaatgataccttgttagccccgattggaattacctacatgtgtagacagtttcttgccatataggctgggttgcatgatggcgactatctagtaaatgtggatactcgaaaccatgcgaactatgtctgtagccacccattgcaatggaggtaaagaagccaaaattcaagtatatagcccagacgctgataaacgcaaccgaatcacgtatatactgaattaacaacgaattggatgacaaaatcgctgttcatcccatcaattccaacgccaaagaacatcaatcataaccgtatcagcggtacccggagaaaaaggataccgcatcaaatcaactcatcacgaccagcagccgcactttcctcaatagcccggcgcacctggctctctttaaaagcagggccctgtccgtcacactgcgacatacccttcaaacgctccgtgacatcaccgatatcaagttggccgcgctcaaacagttcatgtttctgaataaggtcccacgtagcacccgcatccagcagcttctcaccggtaatcggacacacggtgagacgatggtgcaggtttcgagacgtgccagggctgtctgccataaacgtggtatggaagtctgttggggagtacttcattgggcccgtaaccgttggttcaggattctcgtttgcgccgacatgtccgcggttggcctgttgtgatgtcgcgcgcaagatctcattctcggttgtgtaccgggccagctcgcgcttgaggcgctcgttgtcggcttgtaatgtgttggaggcttgttcgaggctatttactttgtcttcgaggtcgcggacgtgctgttccttgcgctcccggaatgcccgctgactgtgtaacgagtggaacctgttagtgtttgctttacggggatagatgtctctagacacgtgggttggatatgtcacatacgctgctcggttttgtgccttgcgcttgctttgtgcgggcgctgagtccttttcctcgctgctactcctccctaaagctgggtcggcgaattgagtttcatcgccgtcgaatgaggtggggcgtgtgtgctgagtgttggcggcatcgctggaagcagagtgcttgaccgagtctggcggtgaatgcggtggcgggacaaaggaggggtcggcagggaatgggggtatatagccagggaagttttggtaattattctggtctattagcgacaagttcttgacggttaggggggaacaaagaacctaccacaggggcgaatgtatctggttgggcatggggttggtcgggggtaggcagcccgtagagcgagaagcccgagggctgtgatcggggatcatagaaagagtaatccattacagaatcgtagacagattccaaggtctcgagggcttgtcggaaagttaggaggtgagggtgggaaaacttttgaggaaaatctattatctgctcgagtttcatgtaccgggggggcgttccgttgtacgatgtacagaattcaatgttgtcatgacactcctataccatctcgattcaaggtatacttccaaggtctacatgtaacctctcgaatgtccatcgattccaagagtgctcggtgcatgggccaaactttcgatgatctcatcgttttttactctttttggaccgggaagtacggatgttggggcgatggcggtctggttgcgagttgaatagcacaattccagttgagatgggagtaagcaaattgaaagtgcagtgtagagaaagctaagagaaataacttgacacaaatcgacgcataccaccccggaagcgaccctaaccaatgtccgtcgccaaccacaccagtttcctgcagagcgggattgccctggaagccttctgtaacggtaatttctgcaatgtagcttgagcagaaatccagaaagcctgcagagcaatgctcccgaaagctttctctgtcccgaaccccctcttggccatattggaggccacacctcgtccccgttgagcgtcgatagttcacaaattaatcatcgccagataaacgcaagaaaaaaagcaagggaggatcgagggcagagaagaaacatgatgagtaaagaaaggggggtaagcaatgattggcagcgcatccgaagatgcattcaaggatctccattaccagcgattaaacaatccgacaagaaaatttgcgggctgaggccgtcgtttgcatctcccttagtcttgccctgtggtcattctgaccgaagatgccaggttgtaaagagaaaccaaagggcgaagacgtaagaataagccacaatatcagaagcgtttcgagatgtgtaatcggttgtcccgcagaacgggtacaagaatccgaaaagacagaaaaatagtcgataaagttttcgcaggctcagcacaagattgtccacccaattggcaaagctttcatggggcatagagcaggcgataaacagaagcgaatcgaaacggctgagatcgaaatctgatcgaaaacgggataggagggctgtcggggagtgcagaatgaatagagatccaagaagaaaaaaacaaagaaatatccgagaaggctgagtgcgacatggtccgctctaaggcgacatgagggtccccggtttcttagtagataagaatgtgaacagacaggaggcacatatgacacatagcctcactgtcgtgtaaacactattagtaccagtgctcctccggtcctgcgtccggcttcgaacggccaccggagggtccataacccaaagcagcacctttcgaggcagaacgtagcctaacgccgaagactatgcgattagtcagattcagaacataagggtcctccacgccagcgtcacgaaatgcaaatcactcaacgtaggagataagaaagaaggggttccctactcggaaccaggtttcatgtactcacatcctgtcactacctcccacggcacggttggtgtccggagtgtcgagggcgccgcgttcgacgaccttacgacgctggctggagatggcaccgggcttggtggcaccactagctccaatctggccagtagcaggcagagcctggcggcgctgctgatcctcggcatccttatccttcttggaagcgtccacgatcatggcagcgttcttctggtacttgtagacggtccagtcgaagacgtaatcgtactggaaggactcgcggacgaagaggtcgcggaaaatcttgcgcaagtaggagtaatcgggcttgtcatcaaagcgcagcgaacgggtgtagttcaggtaaatggcgaactcgttggggaaaccacggcagaggacctcggtaggggtggtcatcttcttttccatgatacggtcgtacttctgcttcttggtagcagccttcagaccttgccaggggagagaaccacggcagaagtagagcatgacataacccagagattccatgtcatcgcgtcgagactgctcgacaccgaggtgagtgttgatactggcataacgggcagttccagtaaggttcttgttctcacgatagggaatgtggaagtgagtcttggggtcacggtatttctttgcaagaccgaaatcaattacgttgacctgattgccacgcttaccgatacccattaggaagttgtcgggcttaatatcacggtggatgaaggacttggcgtggatgtattcgatgcgggaaatgagctgatcggcaagaagaagaacggtcttcagcgagaacttgcggttgcagaagttgaaaagatcctccaaactgggtcccagaagatcgatgaccatggcattgtaatcacattcggtaccgaaccaacgaacgaaggggataccgacaccaccggcgagcgacttgtagacacgggcttcatattcgagctgggggtgcttggccttaacgctctcgagcttgatagcaatctcctcaccggagatgatgttcgttcctagaaattatgagttgctatgaaggggtaaagcaatatctgttatatgcataccgagatagatatcaccgaaactgccactgccgatcttacggccaatgcggtacttgttaccgactcgcaaatcctggaggcaatgtcagtaaaactggtggtttggacatctcgttgacaatcagaaagtcatggtataatccgagcgtaattttctccagccactcgaggtatgactccgggtgaaaaagaaaggaaggaagaaatcgggtaacactgaccatggtcgtcatcttgaaccgatgggggcacagcgcttagccgtgaggaaggacttgaggctagaagattgagaattagtgttcaaatcctgttgacgaagtagaactgtatgcaaagctgatatcgatggagtatagaggggtgcaaaggaagtggagaggaagaaagaggtgtgaggcaaagaaacaaggaagtcaatgagaggggttgacacctaagcctcaggcaacttgagagggctgggccaggtcaacgaacacagcagaaacacaacacactttgtatatgatgcaatgaagtacatagggcaagggaatgtaacagaaaactgaaagtcaaaaaggcaaaaaggagaacgactcgatctaggcatacctgaagataacgggaccgaagctgtactgaggtcaagaataggagatgagccgggaaggtccggggggggggaatatcgagagaataaagaacaagggcaaagccttgaataaaacggagagatgatgctgagagccctgaagaaggagaagaaagaggagaggaggtgagtcggtgagaatttccttttggcggtttaatatgcaggggacggcagtcacgcccgaccgtggtatggtaagattggtattgggcatctatagacttttacgtacattttacagtcgccgtaggaattggtatagattcgtattaaatcatatcagatatcagaatgcatacagtcactatatctttcttgtcaaactccatactcacacaatccatggattacgtctcagctttggtgggtatgcaatccctcaactgaccggtaggtggtcaatgagacctgtgcggacaacaggcatcaagcctataaccatgcgctcatcatcggagtgatacccaatctaagatgtgtacgcttctcatttgaatcatatacaatcatattgctcctcgcgagacatgatatccgcagtggtcttgcttatgcatgatcatcaatcaacaataccagatatcatactccttagtatgcgcgattttcctcaatgggaaagtagtttcagtctattaaggggcaaacgtggagcgacctaactagttaggtatcacacccggttactaactattgccaacagtacagagagagtatgtacttctacatcgtagagtaaaaaaaggcattgctgcagagtaagtctgtacctatcgaatcgggctgatgacaggtcatcatttccaccctggtgttgtcgaatttacaacccttcaggttatccttatcataatgggtttggtgaaagataggagcctccacagggcaattaaagcgatttttcgactatggatgaacaaggaatccgcgtggaatatgctagtggtacagccagagtccaatgaacatcagaaaaccggggtataaaaaggacagccaggaggttgaagacaaaatcaaaactggaaagggaaagggcagataaatgagcgcaatggcgagacggaatcagaagataacaccgtgcatcgacgtagaggaacagagaagatgaaagcacacatcatacatagaaagagagtgggaaaacacaacggggaaaaaaagggaaagtattgcaaatacaggtgcagaacgctcagacggtgcaaatcacatatcttagggcacatggtcatagaacaataatggagagcatgatctctagatcacgttagagtgttcggggtgtgcagctccattgttcaatggcctggtttgcacatcaaacccagccctgtcatcatcatccagtcgccttctccattctgccaagctatcactcatcagtgcgggtccatcactatggtccttggtaggagtccgctccagatccagctggctgctcagacggtaattgcggttggtgctttcccagtgacttcgcaaagcatccaactcgttggcaagtgaatccagagccatggaaccacgattatcggggaatgtagaatcctgagaggcattgctaccagctcgtggtcgcccattgactccgctgatggtgttgctagaggcgttgctgtgtgtgcgcgagagtccaagtccattgggaccttgcccgtggtgggattgacggcgataatgaccaactgatgtttgaacctgctctagaagcatgttcaccttacgctctgcatcggaagcacgagattcaaggtgggtgttctcttgcttgagctggttcagctcggcacgacttttctcagcggcagtacggagatcttgcttaaggcgctcatgttcacttcgcgacaactggttctcagcggtggcttgatcgagatcttgcttgagctccgtgatctgactttcaaggctggcaatagaagaggcagttcgatcttggagttcggacatcgaaagctcaaggcgggaccgttcagcgtcccactcagcagaagatccaggtgtctggctgtctgaattctcaaggttcttctgagccacatccaattcagattgcattttagcattttgagccttataccgacttagctcatctttcatccgcttcaacatcttctcggtgcctttcacgtaatgaaccgctgactggtaatcattctcaagttgctcaagtttctctcggaaagctcggtcggcttcctgctcacgactttcaaagccgttcttcaggtcgtcatgagccttgatgctagccgagagttgttgctcaagctcccgtagtcggctttgctccggagtgccgaatcgtgatccgggcgagtcaagccgtggggaccgtctggtgtcactgttcaccccacgctcaccaagaagatccttcaaagcagcgtgctgagccgctaaagctccagcctctcgctggtgagtttcaagttgtgccttcaggtcccgattagttgtggcggccgattggctttctttcattgcagtctgaagctgtctgcgcaattgcaagccttcacggctagcctgctcctggtatgcttcaaggccagcaatccgttcctctgcacgccggagcttatctgaggcttcgttggcggctgcctggttagccttggctagagtggtggaccgctcgatctgggcctccatagcagcgactcgctggtcagcacgagatcggaacgaatcagtcaaatctgtagaagatgcgcgttccagcccagacagcaaggcaagcttgtgggtttcagcctccttcgcgtggatctctgctaatgcctccgcatctcgaaggcgacgcgtaatgttctccaaatcagtagtccgttcttcatgctccgatcgaagctgcagaagctttctctccagaccctcgcgacgctctcgctcctcttggaattgcttctcgacgagggctgtcttcgcagtggaggcggaaatagcttctcgaaggccgccaaagctagaatcatagtcctttaaacgggtggaggattcctcaatctgcgccaacaagtcttctttgtctagaataagttgttgaagagaggcttccgcttctccacgcaagaaagcctcttctctggaaagagcctctgcttggtggagctcagcgcgcagattttctgcttccagagtattgctttgcatctcaagctctgccaggtgcttccgggttgcctcattcgtctcttcggcaagctccttggcttgacgctcctgcgaaagctctgtggtctgcacatctaatttagctttcaactcggatagggaggccaaagcgagggcaaggcggcgtcccatgtcggtgggtcgctcgtcatctccatcgcgagaagcatcaggctggggagtgcctcgctgactgccaccatgagcagcgagcttcgcacgggagtatgcggcttcattgatagccatatcgcgttgatgttccacttcagcaacccgtttagatgcgatggccgcttgtcgatccacagtggcctgcatcttgctcaggtcagctctcatagccaagaatgcctcaaccagcgggcgatcctcatcgctcagagcctcattagcccgatcgtctagcgcggggctactggttgcattgggaacatagccacattttcttgccagtgcgagttcggaggcataccaggcattccgggccttggtaacctccaactcttttatcaaagcctcttggtggggcgtaagtcgaggagaccgtggctcatcaccaagtgtcttggagttgcggaaggtccgagattccaccgaaccctcgatgctagtctgccgaccgaggattgattcctcaccgctgtcaacagacccacgctgtctttgagatcggagcgaccgttgtcgacctggggtactgatcaacggagctgcctcgcctgcttccatggccttcgctgatggcttttgatgttgtgttggggttcggcgaccagctgatggaggtccctgggaatcttgcggaccttccttcataattggtgattcttcgccacgctcgtcgtttgctccacggatatccgcggttggtgtgtatccgcgatcattctttgtcggggtcttgctacgagggttcgcaccagctggagcgccattaccacgaggcccaggagagggtgcttgtccaggaggcggtgggccagcaggggcttgggcaattgatgcccgtggcagtcgagatccaggtcccaaatttggattggggccgaactcacctggcctattaccagccgcaccgtgtgtcatgctctcacgcgatggcgttggcccacgtcgcatttgcggttctgggactgcgttttgtgcctcgcgagacgagcgtccagacgagattccaggtttatcaacacttgtttttctggtcgccggctcgggaacgcgtcccccaggttgcgaatcattggggtaccggatcttgctagtatcgaggatgtaggacatgctaagctccgccgagtccctaggagccgagctcggctcacccgccataacaatgatctgcttaccgaaagcagtcatgctgtgaccagatcgaggggacggcgcagggcccatgttttgaaaggagtaccaacgtcgagttgagatgcggaaggctgacaggtctcccaggtccacaccttcatccgtgcgacctccgaacacatacatcacatcgttgaccaaagcagaggcatgaccctccctaggagccgggataaaaccaacgcaatcaatctcggtccagctgttggcgatgtaatcataagaccagacatcattgaaccactgcactccattcgtacctccaaatagatatagcttctcgttaaaactgacgatagtgtggtttgttctcgctggaggaatttggcctggcgggggtccgccttcgtgactgttcgggatcaagacctcccatttgtttgctgggttttgaagctggttcaaatcaaaggcaatcaaatcattgaagaagaagccctccacttggcctccgaagacgtagagtttggagcctaggatgttcaaagtgtgaccgtaacgcccggaaggtcgagagccgggaggaatcgcgcgggaccattggcgggaagctaaaaagataaagagtcagggtcatagtaacatgaataatcgatgccatccttacatgtgttcaaaagatacagggtgtcgtcgagagaatcattctcgtcgattttggtatcaccgccgaacacaatgaacgcattcccaacaagcaaactggcatgaccaactcgcgggccagggccttcagataccgtcgcaacctgcagacagttcaagcccccaccactgctctcaatcatccaaagatcacccttgacggttgatccatcgatcaggcctcccatcatgtatatgtctccttcctttgatgccaccgaattgattgctgctccataccgaggaaatgggttcatctggggagaagagaagttcaagcggcgttgcgaccatgggtaaagggatgaaccggggcttggatgggggatcccgttgggcggttgctggggtcgttgcatctgtcgtagacattagagctatgtcctcgtcaaatagcgaatggatcgcgaaacagatacccacctgggattccgattccgctctctgtcgcggccgcactgcgtctggactcgtcgggcttgcggctgagcgtagagagttgctgaaactaccgctcggggtcggtgtctgggaatttgtgccatcccccttgaccccatttgccatagtaggggatccagcgggtggagcaccctcggaggtgtggacatttctagttgccggggggagtgcagctgcagccgcctgctgactgtgctggtgcttcttcgatttaaacagaaaggccatcgtaatttatgtggtcgtaatcggtcgtatcaggggatctggcgcaaagtcaagctgcgcctaagtgtggactcgatccgacacccaaatatcgaaagaatggcgtggtcccgaaagattaagtggaaaatccgagggataggggagttgtctatttcagaagtgaagtgggaaccaggaaccactaggaaccataaaacgttccatgcacaagccgctcagcgtccccccaaaaaaataaatgtgggcagggggaggcttctgaacagaagcattcgcactaagaactcgaaaaacaaatcaaagcggcaaaagccaagggaagaaagggggaggttgaaggcaggaaatgtgaaagaggaaaagcgaagatggaagagatggccgtttcaatttcccggagatgctctaagtcaaactagtcttagtttcattggacatgcatactcaggggcatactatcactcgaatctttacttcaatgcttgtcttctacttatatcccccgtactgcgtacattatactatttccttcattcctttttcccagtctcttttttccagcctccaggaaccgaggggggattgacattccaccatatcagcgacacgtcttgagcattcggatgttagatgtcggtattcccaaagaaagtgaaaattatatagaaaaaaaaaatatataaatatatcaaaactataaaaaaggtttcacaacaatgtcgcaaagccttgagaatattgagctgcattatatccaagggttactccgtacttcaaatgccgtccacagccctggacctggaggcttgtgaaccctgactatcacactatcacactccaattgctatatgccacgggccgaggactcgccacggtgtgaacaaatgcaggtccaataacaattcatcctaacactgcatttctggcgatccataccccacagtgtgcaagaaacactgattcagattaaggctgtacaatataactatgtgagctaatgagtgactctaaatacctcgctaaggaaaagatagagcttttcgagctgatagatccaagggaaagggggttcccacctatgaaaataatctgggcgatctctcgtttcccggctctagggttattgtagggatgagcctcttgatactgatgtacttttgcagtaatctatcttcattggctacgtctttcttgctttttctttttggtctgctattttgtataagaatcgacgtgtcagattttggatgtccatcctttcttaggtgaaacctttgatgtcccctatgattgctgtcttagacatttccaccatacaatatctctcttagattacagcaaaattaactaatatgttcctaaattttgtcctacccagatagttaactaactaaccgtagtactccgtgatgtaagcaaattcctacctgcttctaggctggtgtccgcattcaacatctccaattaagatttcgtggttcatacactctatagataggcattcaaagctgactacgttggaagaaagagctattgaccatttacaggtcataattgcctctgtcatattgtagaacgacgcgccagaaaactacacatttgagtctatacttctgaatgccaagacatcattctgagtaatccccggaatatctgtgtttccgcatccatctcgcctctccgaaccacatccgctctagacctggcagattagctctatttggaccagaattcatagactgtgcgctgagctctctccgcgctcctggaatatctccagggcagtcgcaatttgagaccagtctatcactacaaatttgaccaactccaaggtcaccccggccatttcatcatctatctcttccccagcttcagtcgacaacacccagacccacacgagggaactcaaggaggaaactcactggttgtgaccgatgaccgagcggggatactcgcagcttgccttgacatatctttcagccctccctcttcccctatactcgggtaacacaatgatcaatcatacaacatgagggatcccactaccgatatggaacaaaactcacagcagacgaccaacgggtccacggcctcgcgtcgcaatccgaataaatcggtccgcgtcgcgtttggtcccgacttagagactacgattcccacccgcgaaagatctccagccccgttgagtagccatcatcgttcgctcacagcagttgaacacaagcagcccacactgacgccacacgggcgcccaaccagctcttcgggagagaacattgccatcggagagatcccacctcgccgtccatcgcctcggagatctgagagtagccgaccggctatgctgaagagagctaaaagtgattatggaccaagtcggataaccttcgataaagtggcgggcgatgacgacgaagatttcgctatgcgacatggatggcaggaggaatatacctccagtgaatatctcaagatcttgcattctgtgagaatgaccactctgatcatgagtttccggaagctaatataaatacccgctggatatagaatttctacatgtatttcaccgagaaacgccacgagaccaacggtattcccagggacccagtcgggagttggccaagccaggactggcgcatgaaagaccgcctgaaaactgtgtctgcggctttggcaatttgtctgaacatcggagtcgatcctcccgacgtggtcaagacgaacccgacatcaaagcttgaatgctgggtggatccgagttctaccacaggtggtggtcaaaacaagatcatggagcagattggcaagaagctacaggagcaatatgagactttgagtcttcggacaagatacaaacagtatctggatccatcagttgacgagaccaagaaattctgcatctcacttcgccgaaatgccaaggacgagcgagtgcttctgcattacaacggacacggagtgccgttaccaactcagtcgggtgagatctgggtcttcaacaagaattatacccagtatatccctgtcccactgtatgatctgcagtcttggctagccgggcctagtctttttgtctttgatgtttcacatgcgggcaacattgtccaaaacttccacacttttgttgagaagcatgagaaagaaaatattgaaaccaagaaacgagacccgaatgccgtccttcagaattatggtgactgtatcctcctggctgcgtgccagaagacggagtcccttccgaccaatcccgaccttcctgcagacctattcacctgttgcttgacaacaccgattgaaatcgcattgcgctttttcatcttgcagaaccctttacgcacaaacattcccattgatgacttccgagttcccggtcgcctacaagatcgccgaagccctcttggggagctgaattggatcttcactgcaattaccgatacgattgcgtggaacaccttacctcgggctttgttcaagaagctcttccgccaagatcttatggtcgccgctcttttccgcaactttttactcagcgaacgcatcatgcgcacatacaaatgccatccgatatcttcgccggaattgccagacacacatcatcaccctctatggaaaagctgggacctcgcagtcgagatggtgttatctcaactaactgctctcattgatcatgatgaaggacgccagcagtacgagtaccagcactcaacgttcttcgctgagcaactcactgcttttgaggtatatctgtcgtccggtcctacagagaagaatccaccggatcagcttcctattgtcctccaggttctcttgagtcaggcacaccgcttgcgggccttgattcttttgagcaaattcctggatctcggaccatgggctgtccaccttgcactgagcattggcatattcccttatgtcgtcaaattgctacaatcagcagctcaagaattgaaacccgttatggttttcatttgggcgagaatcatggcagtcgaccacactgtacaaaatgatctactcaaagataacggcattcactactttatctcaattctgaatccctcttcgcccattcctgtgggcaacgccagcgaacaccgggctatgtgtgctttcatagtctcaatcttctgcaaaaactaccctcagggacagaacgtctgcctttctgtcgagctgtttgattcgtgtctcaggcatctcggggatgtggaaaatcctctgctacggcagtggtcttgtctgtgtctcagtatgctctggtgcgatttccccgaagcaaagtggatgggcattcgatgtgcagctcccgctaggctctgcgagttgaatttcgaccctgtacccgaagttcgtgccgccatgcttcacgctgtgactacgttcttgggaattccagatctgactgaccaagttgcacaaatcgaggagactttagccctggcagtcttgcccatgtctgccgatgggagtgtggtcgttaggaaggagcttttagtgttcttctcaacattcgtcagacgccaccaaaacaaatttttggtcgcagcatttgaggagcttgaggaagaaaagcggtccctgtgtcatcgctgggagaacgaaaactctaagactaggcgcgccgaaggacaaactggagcattagtttctcatgcgaaacacccccagctgtctcgcaatactactttcggaactatctggaagcagttgctggctctctcggttgatcctcatcctgacatcgcccaggatgccgccgttatcgttgattacattcaccttgccttgctagaatccccaatggcgccacttactaacaaacttcagaacgagattctagaagtcacaggcttgacgaaatcccaacctcgcgagcgaactgaggtgaagaaaaccgtgccacctgcaacgcctcccttgtctggagcagcagcttcgagacaagaaggctatctttctttgggttttaggcgaactgccagcgtcgctgcttccctgaaaaaccttgcttttggcaattcgtcgccagacctatcctcagataattcaaaccccccttcgccttcaaccagccgtatgacaattaccccacgcggccgcgcccctcctgagtggacccgacccccggaaggaaatgatcatgttgctcccgcaacagcgtaccaccaggctccgattcccacatcccgagggttccaacccaagggcattgatgtcgtgcccgttattcccctaaagagtcgattcctcgactggtcgaccgaggtaattccggattttgaatcctttctctcccacaactatgattaccagcaattactcacaatttcgaagtatttccgggagccccaaatgaaacccaacgagccggatgagcccggtagctccgactataaccagcgcctctggagacgcggccgcaacgaaaagatcattgctgaaacccaacccctcaaaggaaaagctggagcaagccgatgggacaactcgatcgctttgctatcgaatggtagccagccccacaagatgtgcttccatcaatttgaggatcacattgctgtcgcagatgaccgggatacaatctcgtgggtacaacaagtcacctgttcttcattatctcctaaccattagtttcgtatagaatctgggactggcagagccacaaacgcctcaatcaattctcaaatggcaacccggtcgggtcaaagatcaacgaagttcgatacatcaatgaggacgaccaagccctgcttatgactggatcttcggacggcgtgatcaagcttttccgccattacgagactaataagaagattgaagtggtcacagcctttagagcccttcctgaactgattccaagcaatcgtaacgcaggccttgtgcttgattggcagcaaggtcagggcaaagctctagttgcaggtgatgtcaaggttatccgcgtctggaatgctgctactgaggtgtgcacaaacgtaagtattcaatgtcttgtctcgcaaatataccacgttactcacaaaagctcaatgacaggacattccggcaagatcgggctcctgcatcacatccttgacatctgaccaagtggcgggcaatatattcgttgccggtttcggtgatggtgctgtccgagtctttgatcaacggttgaagccaaccacatccatggtcaaagtttggcgcgagcacaagcaatggattacaaatgttcatatgcagcgtggcggtctacgagaattgatatcaggtggccgaaatggtgaagtccgactttgggatcttcgcatggatagcccgatctccaccatctatgctactaaagacaccctgcggaccttaagtgttcacgagcacgctcctgttttcagcgtgtacgtttcctccgccgccatattctaatgtttgttgtacgctaacataacgcaggggtacaaatcgccacgaagtcaagactttcaatgtggatggcacctatctttctacgtttgagccatactcgagcttccttcatcacaatcgatcctcgcccattgcctgcactgccttccatccccaccggactgtgcttgcctgcgccgcattgaatgaccatcatgtgaacctagtgtcctgctaattccaactcagctccgaaatccatgataccttcgtatggcaaccttcatgacgttgtttctttctcttgtcctaatattaccctttctgtaatatgcattcgcatacccgatgaacaaatctacacggcgtcttggcgattgacttgatcaaccatacattgatggctctgcgttgtttttttttgttccctcgggaatgcttcactgccctttgatattcgtgatgattcctttattcttctatttcgtgtgagacagtgtgcccagtttcgggtctatgaatttctttttccttcttttccatttttctcttcctcggtattaggcacacaatatcttgtagcaatcggcactagttgatttcctgacagaagaacgtataattgttggagtgctcgagctctgctcgctttaatgcagtaagtacagcgcaccagaggcagtcctgtcttgactgatagcctggcctggttctattcttcttctatgctttttgatgaatcgatacaatgcattagttagtattttgtgggatctagcttaggtctttatggatgtacttgatgcttggccgcgcactttaccttagtgccccacctgggcaggattagggcgtcatacgctcgctgggtggaatacgctggccgtttcttcgttaatatacttcggtgtagttgaagggttgacagccacactttgtgtttctgtttaatctcttgcatgtttccgggcttattcggccgattatgtggtctttcttcttgaattgacggtctgacgtgttgaataacctgaattttcaaatcatttagaaacaatatcaagccgttgaactgaacgcaatactacgatatctggtctgataagtttctggatatatcttctgatcatcaccctaccacatgtacaccatgcccaagggaatcacggaggaagtcttggttatatcgcatcctcccgaaaaggacattttcatttatatcatctaatgtgttgtgccaggtctgattgggaagaggcagagtgagggcaaatgtagtcacgtgtagtcatctacaagtaaaggtagtgaaaaaaagcagttagtagttttaaaagatacgtgctttgtgtatgtaacgaaaagcgatctatataattacgaagcatgagccgaaaatgtttgcaaatgtatcttcaattatttatcctgaccaacttgaattgacgatcattcgaatgcagtgagatataacaaaaaaagtagattgatattaacattgtttgatcattctcataaattactcaagctatgaagacagcctagaaaatttcatataacatcacactcatcaatcgcctagtatttgcgctcgctgtaaaccgtctcatccgcgtcgactctagggtcaagcttgttcaatagatcggagctgtggggaccagaggtcttcccagtcttcgaggtttctgtgtagctgttgccaccgccggattgcccagtagtgctgtagttctggctgctagataaaggattgttcgagctgtgaccggtctgtccagtggtggtgctgctgtaattgtcgttgctagacaaagggttgctggagccgtagccagtctgtccagtggtggtgttgctagacaaggggttgctggagccgtagccagtctgtccagtggtggtgttgctagacaaggggttgctggagccgtagccagtctgtccagtggtggtgttgctagacaaggggttgctggagccgtagccagtctgtccagtggtggtgttgctagacaaggggttgctggagccgtagccagtctgtccagtggtggtgttgctagacaaggggttgctggagccgtagccagtctgtccagtggtggtgttgctagacaaggggttgctggagccgtagccagtctgtccagtggtggtgttgctagacaaggggttgctggagccgtagccagtctgtccagtggtggtgttgctagacaaggggttgctggagccgtagccagtctgtccagtggtggtgttgctagacaaggggttgctggagccgtagccagtctgtccagtggtggtgttgctagacaaggggttgctggagccgtagccagtctgtccagtggtggtgttgctagacaaggggttgctggagccgtagccagtctgtccagtggtggtgttgctagacaaggggttgctggagccgtagccagtctgtccagtggtggtgttgctagacaaggggttgctggagccgtagccagtctgtccagtggtggtgttgctagacaaggggttgctggagccgtagccagtctgtccagtggtggtgttgctagacaaggggttgctggagccgtagccagtctgtccagtcgtcgctagacaaagggttgctagagccataaccggtctgtttagcagagtggccagtggtgctgccgtatttgtcgttcgagccatagtcggtcacttcgctagaacggccagtgccgctgccaaaggtgttggtggagccccggttgtctatgtttccatgttagataaatgactctagtatgttttccaggggcaagttaaacttaccgagatcgctatcgacacggggatcggccttgttggctagcttagagtcatggggaccagcattgatcttactggagccggtgttggatgagccatatccgccagcagtgtttgatccgtagttctcggacgttcctgggccgacatcaattggacccttgcgggaatcatggatagtgccagtgccagtgccagtgccactaccgtgacctccagcaccggttgtggatgaggtctcatagccggggccagagccagagccataggtgttggagcctgcgccggtagaagtgtttctattaaaagtattgtccgtagtcctgtccgaggatccgtaagtatcccgggtatctatgttaatagaataattagcatcacactgcaatggttttttttctaggaacaacgaaccatcagtcttgctgctggatgtcttcgactcatcatgatgatgaccggtcacggcatccttgactttgtgaatgatgttcgacatgatagtagtgttttgatagtaaggtgaaagatttggaaggagttgtagttggaagtctgactattgttcgagtcagatgattgtttgtttaaggaagaagtggaagataatgtgcttccatagccggtttatataccctattgtctttgcgtgtcttgaccagctcatgagttgatccctacttgtggagactgagtgacgccataacgcgggggctccacgagtataatcaccggtgaaacatggagaactccttcactgccttgtttacaactgtcatgacgtcccaaacaaactttacacatacagactcatagtcttggctgaaaatgcgagctatcttaatgtcattcatcgtcatgtcccggatcttcaagaccaacacgccactgagccaagtcttacaaggatatgctgtcgatctactcgccgactgagatttcatttcgagtgggttttccagactttcgtgccaataattctctgagtttgacattgctatatcgtggaccatggaagcttagctctgagcttatcttgtgtctttataagaagagtctagggtgttattattagtctcttatagacataataaacgtatcgaaggcagacgaagagattctcgaaagattcctgcaatatccactagtcccctttagtatatacacgtcatatgaggggttacataatttcccacgctaatccagatatggcaagtggggacaagctttatcgatcgtcaagtccaaaaatatctgacgggtgtgccttgaacttgttttaacattggacatagagtatactagctgattcgatcggatactacaacatacagtctatgatgttgcacacattcatagcgctgcttcaaatcaaaactggaaaagggggtggcttatggagttgcctagcagtgcccagccctggaggtgatggcatgatcggcgtagctcgagaaccttggaagcgatatcaaatcgactcggtacggagtatatcaaatctacaatacgtgtctgttattgcgagatccaaatgagggggcaaaaacgcaccatgccatcttgctaatatattgtgacattgtacgagttacagcatttgtcgatttctctcacaatacttgttggagtcttcttttcacatattaagcgcctgatgctataaatgagcggaggatatgcaagtcgttagctgagccagtatagcaccaaggtctaatagttacatattctacatagtgactcggtatctgatttaaggtcgtgtggtttgaggcaccaaggccaataaatgccttaggcttccaacacatgacacggcggacatgccgtcacttacccggggttagataatccacatcatgagttcatttccccttctccacctgacttcacttgaactcccctcctgtctatctgactccttgttcggtttggcttccctacactcgcgttggctgtcatctgtcgtctttcttcaaccagccatagtgctgcccattgtactcgatgagtggccgcctgctagcttgccgccaactgttggattggtcataaaagagtccacccaaagtactgtggtacagcggagccgctggcatcgtcaatcattcacttgatccaccccattttgcagtgattagatatctccgattaagccactctacggtagaagaggctaaacccatctatcagagacatgcgaccgccacgcctgctcatcgtactcttctgccttatcttcttcccgatcctcctcaccttcttttccgcgcttacatcacccgatgtagctcctaatactctcgctggtcagaaaactgggctgcgagctttgttttcttttaacataccatcgtccctttttcccccgtcggctattatcagtctcaccgatgacaactcgaccttctttctcgcccgaccagcggcatttggctccctactgccaaccaaaggccttagcggtcagctatgggtgggaagtggctttggtgaggggggattagctggtggtgtggaaggagaactgggctgctccgatatccccggctggggtgagagcaaaaatcataagaaacaagataaaacctctagagccgcggagcagagttccgggatctccgggggaagtacagtgaatgatcaatcctcaaaccgcccgcggtcggtgtcgcaggtcgatactacgcagaacgatagagattcaactaccccgcctttgacgaacgatggcactgacgaccatctacaccatccactccctgaatctggttcttctaaccccgggatgaatcagaaatatggagattacgtccaaaataagccgcctgcgcatgccgacatccaatcgctacaggaaactgccgaaatccagggtaaagtagtgctgttgagtcggggtggctgtgggtttttggagaaggccaaatgggcacaacgacgaggagggattgctttgatcgtcggcgatgatacccggggtggcaacttggtcactatgtacgcacgaggcgatacatcgaacgtcacgatcccggccttgttcacatctcacactactgctcatcttctatcgtcattggttcctgggcatacaggtggaactgccggtctagaagatgtagtaaaatcatcacaagcgaagctggcaggacaagctgaagccgataaagaacgggtggcaactactaccgcaacaacaacttttcctagtccgactgccagcagccattcgacaaccaaggagaaacctgcaccctcttctcactcggaaggcgggtttttccgtgcaattggtgcattcttgggattgtgcgataagaacggaggttcgcggcgtctagaagacagccgacgtccgcctagcagcggcaacattgattggatcaacctaggctcacggaatgaaaaagaagccccgtcgagcgcttggaggagatcaacagatctcaatcatcatggtcgggccaaggtagacgacacattcgacaagcacaaggccgacatgtccactgaaggtcttgaggatgatgactttgtcatcggggttcaggactggagagatcctgacttgatgccccctaagagtagcacccatccgacaactagcatccctgcaactggcaaggatacctccaagactgccagtgcggataaagatgcctcttcctcgcccaacggtcttcagggtggtagcatcacaccaggaagtggagaataccagagcttcgagaaatccagtgctggttctcatgacacgcaccgcaaggggtctgagaaagaaaccatcggaactcatgggaagtccagatcttcttccacgaagggctggttctcgagtcactttggatggggagatgatactcagcaagaccctcagccttcttcgtcgccttcactccagaaaagtattgcaaccaacgagcagaaacaaaacaacgctcccacatcaagccgtctcagcgcggagtcttccgaacacgaaggtctttgggttacaatgacacctaccagcatgtccaccagcccctttttcgatactctattggtacttgtcgtcagccctttgctcacactgacggtggtttatgcccttttgctgatccggtctcgaatccgccgtcgtcgctggcgtgccccgaagtcggttatcgaacgacttcctgtccgaacctaccacacaattgccaccacttcgtcctcgtcttccaactcaacgcgcccctccagtcccagtcctctatccccgacttctccactccttggcacagatagccgaccaagcgcatcccgatccaatagatcacgttcacaaacattctcgggcactatactagactcatctgtcgtacccaaagaagagaagtgcaacctgcaaggtggatctaccttgtggcgacggaagtacacaggaaggcaggtggagtgtgtcgtatgtcttgaggaatacatcgatggtcagagccgggtcatgagtttgccatgtggccatgaattccatgtggaatgcatgtaagtgacgtgaatttttttgtcttggttgcgaagttttactaacctcttttctcagtaccccctggttgaccactcgtcgacgaacttgtccaatctgtaagggcgatgttgtccgttcgttggctcattgtcaatccggcgattctcggggtcatcgtgagcagtctcttgatgatgttcgcagcgtccagtcaatctctagaggcagcgcatcttccgctccagtaccaattgagggcgtcaatgacgatgcttcagatacggaacaaaatgcaggtctacctggcgaccatgcaaattctgccccacagtcaagctggcgaaacctcgctacccttagcttttctgctctgagtggcgacaccatatggcaccaggctcgcgcagaccgcaatcgctaacatctatattctatccactcttttcgattttcattaaaacattcccccctctgtcctgtggaatttgctctccttgtattgaagcatgctgtattagcggtcgtttggagtttcttatgatttggatctgcttggcgtttggtgagaacagttcggcttgctgggcggttgcaaagtggctgcaaggattgttgaagcggctggaatataccgcaggtcagtcgttcaaatcgtgtacgttcttatgttcttttggtagaatgggtgtttgaatggatttcattgacacttggctgtcataatactattgctatgctaccatcctctagtttattgacactgaataatcgcctaccaacatggcctccgcagctgcacttgtttgtaatttatagtaatcgaagctgctcaaaccacacctcgattcaatgactcagaccaaacgctcaacctcattccttctcaacatagacattcctagcaatatccccaaacacatcaagtgtatgaaccagtcgatcacgcgccaattcaaggcgaggaatcatatcccgacccaaaggcaagaaccactcactctcacgtccagcacccacgccctcaccaacgatgacttcatacatcgccttcacagccttatccgtatcgccatcagggacaaaattaccagtctgtaaaacatccagcgtctgcgcaaccacagagccgacatagtcgaccggtaaaggctcagcgggggaacgacaaccagccccgaactgcgtgttgaacgctcccagccataccgtcaggacacggacgttaaagggcgcgacttctttagcgagggctttacataaacctgcggaacatacacatcaacacataaacgagacatccctcggcagaagaaagagaaaaaggagaactgtaccatccatagcagccttcgccgacgcataagcacccatactctctctcccttccactccagccccagagctgacattaacaacaaccccaaaccgtctttctctcatcccaggcacaatcgctctgatcagccgatttggtccaaaatacacagtctccatctgggcccgcagctccttgtccgagaactgctccactgccccgaggatcgcgtatccggcgttgttgaccaacacgtcgatcttgtgtgtagactcgagcttggataccagctcagaagcggcggttgggctgtcaacgtctagtgtgtgccattcgcccccgttttgggttatctccgatactatctccggggtgcgagagggttgtcgtgatgttgcaagtactttgtggccgtttgattgggcggcgcgtgccagtgcgaggcccaggcccgaggagcagccggttataagccagactagcgggcggttgggtttggtgaatgttggtgcttctgtggccatggtggtttgtgacaggtgttggatgatggtggtaaagatttgactgttgtgatgttgatttgcgataaacttatgattacagtgtcataatatcagaatagcatgtctcttatatcgttctattactgcgtgcctcggacttagggcggagttaatatggtatgtcagcattggggcttccatttcgaggatttaaggtggaaaaaggacttaagctggcgtccggcggttgacaaaggtcatcatcggcttgatctgatatccaagctacctcacatccacaaggttgtaaatgaagttgtcataatttctacagagtgactccaatataaacatgcaagccaaatacatacaaaaagaaatcacagaaaaaaaaagagaaaagcagcccatcaccccggaaaaaaacaaaagtcaatgccaagttcaacaagatcccggcacacacgacaagctacaagcgaaccgccggaacggtaaaggccgaagcatctcattcggacagcggggcatcttcattccattctcgaacggtatcaagtcccaccactccatccattcagcacggggaatcacgtactcccgctggcatacggagcaggactttccaccagcagcacgcacttccctcgcttgttgcagcaagggcacaatcagcgccggatactcggccagctcttcatcggtggtttgctccaggtaaggaagcttgctcacagcacggagcgcgacttcacggagggatggggcgtcgtttacaggagatgccaatcctggtgtgagagtgagtctgttgctggatgggctgtctcccataggattgccctccatgtccatgtaggtgatcgtgcctgttgcgaggtggagaggaccccacctctcggtgtgcgattggaccgcaggagacaagtcctcgtggttctctttttctttgttgttgtagtgccgttctgcgatcttcgctttgtcgtatgtgaggaatgggttcgggcgtacggtcaagtgtttcagttcgccttgctggatgagtttgagaacctcccagggaaggtaggtcaactgattgacggaaaggttcaaaacttccagtgctgtcagtttgcagattgtagatgggatttcggccagcttgttgtttcgcaggctgaggactttaaggttgctaagctcgaagagatctttgtgcagggttgatagagagttgttggggagatatatgctgaggaatggctgcagagacgtgaagacgttctctgagaccggggctttcttgactgatggaagcttcgtcaagtgctgtaggggtagtaggagaccgggtggtatagttcccaaattgaattcactgcataggacaaagctattaggatcattggcatgggtgaaaagggacatcagatgaaatggcattagcacataccccaggtcaatgctttcatgtcctttatcaagacaatcaccgataacctcccgggcaaaccgatgaggatcggattcctcgggacttttgaatgcaatgcgagtctgtgaagacatgttctctgtctcaatactgacaggtatagagcttccaggttttctaggatcaagcacagacttgcgcaagtcttccccccacgccgagccatcctccgacggcaaaagcgactcagcaaccgactcatcactccccatccacacaccactatcaacattcctcttgtccttaaagtctgcccttttccgcttcggatccagcacctgctccccccaccaggtccctcgataccgccgtttccgtcccgcgcccgatactggcgcatggtagttctccagcccggaagccgggatatcgtcacttgagaaaagcgcaggatcactggatggctgactagagtggtcgtcgaagcgtgatagtcgctgtgcgcgctggaacgagaccgctgcgcctgtcgctgggggattcttcacgggtgagcggtgccggactcgccgcgacggtgggagggggatctcgctgtccattgcgatctcagttcgcggattcagacgagtctcttatagttctctgcctagatcattgggtttctattccaacacggtttcgatctgatgttcggagttgcgcgacgcgttgtggtccttgtggagacccgcgatggagacctgcgggtgtcaacaaacgcgctaatggatggcgcgattgggagagataaggggataggatcgactggaatcaattgagaggcatcttatattttggaagaaaaccagcttcccggttggaatggaagaagatcagatcaagagataagatcacagcacacgtgcacgggcatatcagttgaccccggagctcacggcttccccactggaatgtcggatcgacacgatcttctctatctttctaccacgtcgctgctattggtgtttatagttggaattggcatcaaaggggaagaagaaaggtgtctatattctgtggatgactcaaactcgactcatgcaagtcctggatatcagccagaccagtctgacaactagcaggtcacccatgacaacgtatatggacaaaagaattgaatcaacagggtttgaagaagagaataataacagcatcaactcatatcggtccaaaaagtcataatgaagtgaaaaaaatggggtatttgaaaaaagcgttaagccatttcctctctgaaaacgggttcttcagctgaccgagaggaatagaaatgttaaagtgtaagaagaaaaaagaagaagatcccggctctgctagagataaacggcaatcaacaaggcagcaagtcatgcagtatgaactgggcgcagtatggcagtggctccaattcatgatcgttgcctgcatgaaggcttcttgccgagaaggcgcgattgtaattacaaggcttggcccaccatcacaacgatatagccagcgacggccaaggcagctggcatgccggcgccaatgttggccgctgcgccgatggaggtggcggctggaacagcagaagtagtggaggccacacgagagaggggagtcgacgtcgaaacagacatggtgctcaggtatctcgcgctggaacttgggctgggacttgggctaggatttgcgatggtactcgccatggtacccgcgacggaagtcgtgatggaagtcgtgatgggagtaggagttggggtcaccgaattgacgcgaaccagagtcttagtaacggtcgtggttgcagtcgaggtaatggtctcctctgcggcgacgaatggagccgcaactaggcaaagggaggcgacgatggtggtgaacttcattttgcgaattgattcgaaggtagatatcaatacggaagagggagcaaagcgattgaattggatttaagattggtgaagcgttgatatggcgccaagatgagaatagatgtttcaaatttgatcgcaaaagagtgagcgtcaaaagagagattcaataaagatcgtgtggagcgctgctcagacagtataaaagggtgactgaaacgagtgtatataagagaaatctctgcgtctagggaaaaagggaaaaaaaaaggaaatttagggcatggccggggctaaataaagtctcgaacctggggaaaagagccattcagtcaaagaagtcttgtggcgcttctgttttggtcttgtatttgctctcttgtattattgtttgatttgcaagtgaaacataaccttcctattggtccattgaacacgaccctggaagattgggctccattcagaccgaactataacatctgaagccctaaataccaaagggttttccgcacagactctacaacaaagacgccaggggtaaagtctgtgattatcgtatgaagagtagttaaatgccatagttgggcttatttacatctgttgctcgtaatttcaaactgtgtcccttggtgcagcaaacacgagaattcttcgcctcgtactccgtatactccggtgtaattacgccacttcctatgttcagaactgtttccagtggcgcctttgcttattttgcttactttgttgttttgctgttttattacccctagagtgatagttagaatgacgattctcgctggacatcacatgctactgcaagtgttcactccctcgcgggcacttccgtcttttccggacccctggcgtcatgcgcaggaagaacaatcttagacataacaataacagacagtttatggaggaattgacttgggtcctgatctgacatcttacctgccttaaaatggttccggtggttcgccccaatactgaaatttaccgcaatttgcccggttcccacactatttagaaagaaactttttgtgttatacatacggagtactatttcctatgttaaaggctctgtagatcgtttccgtggttctattcaggaacgaaaaacgatcgtcgctcgggcctactgtgttgggaatctcgactccgtggcgtagagtctggggaggaggtgagtcattcgatgctcactcattcgtgttcttagccttacaacatataactacattggcacatggtgttatgtgttggcaccatgtcattataagaggtgtctttttcaggggctctggcctcattgggctcgccaagccctatgtcctccacttagaatacaacgacaaatcctaaggctactacggagtatactctgtcgtgtcgatcgacttaaaatttgaagatgatcattatccactccattgtccgtactcatccgtctagggtcatttggacaggaaaaaaaagggaagggggaaaggggttcgctcttttccttctcatgtttagcgctcaatcttattttttgttcaataagattgcacaaagtagttggttcaaattagaggcactcaaatcctacacatgataggttaaatagtctctttttagctttggttgtaaatcggtgctttggaaatagcgttgagaccaatactgtcatggttagatgaaatatatatcagtacccattaccagttcattggtccttaaaatacgatcattttcgctgcaacagagcccgatatcaatcaaagttgtctctagacactaggttcctctgggagaactcggagaactcgtggccattgacatttggtctttgatgtgcgatgattctacgtcgtagacctctaggtaaagactgtattgtatgtagtatcgaaagtaaagaccaagcatgtcagaattgtcaatcacatttgcactcgctcatttcccaactatttccccattcttgtcatcttcaatcattccagttctctcgcttacaacgcaggcttctcatttttgatgtccccgaactgattccgccagaggttctgatatcttccaccctccttcttcagcagctcttggtgagacccgctctcgacaacctgtccctcatgcacaacaaggatccggtcggcgctggaaatagttgaaagtcgatgggcaatgacaaacgtagttcgcttggctctcaatcggcccaacgcagtctggatgtccgattccgtgctcgagtctacggcactcgttgcttcatccagcaggagaatcggtgacttctttaggaaaacccgagcaatggccatccgctgtagttcaccgccagacaacttgacaccctgctctccgactgtggtgttgtatccgtccacaaatgtgaggattttttcgtgaatagctgcggcacgacatgcttcgtggatctcttcatccgaagccgagggccgggcataccgcaaattctcgatgatagatgcgttgaataagacgggatcttgtggcacaacaccgatagtctgacgtagtgagctgaggcttatgtcgcggatgtcttggccgtcaatatcaatatgaccagcagtaacatcgtaaagtcggagaaggagtctaaggattgttgtctttcctgaaccagtcataccgaccagtgcaactgttgtcccaggttcgatagagatattcacatccttgagagtcttcaaccgggaatcataggcaaagtcaacatggtggaacgaaacacggccatcaccaggcttcagcggcatcgcacactccttgtcagtgacgctaggcttggattgaaacaggaagagtagccgctccgcatcaactagatcagagacaagccagcgatattgcgcggagaggtaggccaaaggagagatgagcgaagaccaatactgaatgaagaaaacaaagtctcccgtggaggcgcgtcccacagaaatctcatgtacgatgagcgaggagagaccaacgaagcaaattggtttgagtaagtccaggagtgatctgcctattgctcggcgttgaccgaaacgggcgctagccttcaaggcgaggtcaaccgcttccgcaaagcgagacctctcgtacgaaaactggttgaagtatgtaacagtctgccagccttgtacggcctgatgcataatccgagtttcgtttcgctgtgtctgtgaaacatcacgtctagcgtcgatgttccagttagaggtaaagacttccgtcgcaacataagcaatagatactatcaccaccagcaaggacgcgtagatattgaactttaaatagaaaacaacacatgcaatagccaagtcaatcactgtcgggatgatttctagaatggcaacttctaacagactgttcagcgctccgccttggtcgatggacttcataacttctgccgagtcattttcgatatggaagtccattgacagattcatgacatggctgaaggcagcagcagtgatctgccggtaagagaactgcctgataggaatcttgacaagtgcctcgatcaatcctagcccagctccgccactgatgagctgcagcagcgcccattttcccagtgaagcatatggggttttgttggcaaagatgctatcggtgacatctgctagttgctgaggaatgaggatgttcagagcccggtggcatactaaacagaagatactggtggcaacacaaagctggaccttgcgattatttctggggaccaagtatggcagaaatatcgagaagcttttcagatattccaaccaacccttaaatgactgcaacttgtcattgcggagtcttttcctgcgcatggctgcatcattcttattcttgccggtgtccgaatcgctctcgctcttggagtccacgctgctattttccgagtcgttgccattcgctgcgccatatcttgtatgattgccatttaggaaagggcgcgactcttccgatatctttttcttcctctgtctagtctcaaatagaatcgcacttgccacaaagacaagcagggcaagtcggaccgctgagatggtgagctgcgtgattggcacccactgtctcggcttgggacacaaagagagcgcaaggagtggaatttcgaaaccagcggtgaccaacgagcttccagccacttcgtacttggaaggattctgtcgcagccacagtgccgtccatatgaccgcttgagaggtcatatgcaccaagaatggctgagaactgtccaggtcatcagtgatgattttcaaggccgtttgactgacatatgtgaaaacgatcaagctagccaagataactcgaggtcgactgcggcgcttggagcgagtctttcttctctttaccggagtgcgataaaataaaatgcatattacaatgtagagacttgctatcaaagtacagctataatgaaggggagatgctagctgagtagccatgatgggaggtgggacggaggttctgggtaaaacctctctagcagggtactagcagaggtggttctttatatattcccccattctgagcctcattcctataccaaagacccgttattaactgagcgactgcttattggatagacgcactgatcatgtcaaaggtgcctcctgcgccaggggctgggagaagggtgtcctagcggctatccaaactaaaccgggctgtagacttaggccgaggcggcaaaatggcttcattattggttggaccatgcagatcagactggaatttacctggctacaccgtaagttgatgctcttagttggcagacatgccttactacttactttgtactccgtgcagtggacatctaaggggctgactatgtttcggtgacttgttcgaggataagtaataagggaataatcctgttcctaattatcacactgtgatataggttctattctcaaactgcgaccgtgaccgtacttcgccttcgttgtctgtactttgatattgatcttcacctactctctataaagaaagttccatataacatgacattctacttaccgttaccgcgtacctgcacatgtcaaggcaaacagtacggtccctaactggaataatctaggattaaatctctaaatccccgagagcggctggaacagcaatctaacatccgtctgcatctggtttcaggatcagacaaacggaaacaaacagaactgaatcgctggtacagctgcctgttagctacttgtaggtagagatggctcctcttaaagggggtttctatagtttggtggctatgatcaagacaagacggttatagccttacatactgcctagcctgggcatcaagccacgtcttgagacaaaatagatgccagtccagtcaaataatatgacggttggctgtggttttactaaaagattgacaatcaacgtggtcgtattcagaaccaaccagatttcttgccctgactttggacttaatcaacaagggtagccagactagcccatacatagaatctttgacctcgtagattgatcccccgcccctttgagctggattctcacatcattggaccgtccccacacagaatcacagaggaattttctttccaaggacaggattgaatcgtgtaaaagagaaaaaaaaaaggatatattatcacgacaacgcctcacatggaacaactgagacaattgaacttcaacattcatgttctgggtactgctagattatgtacatcgcgtgtttaagtagcgagtacccatgaacttgtcgtcacagccatatttgggtagttgtcctgtctcgaaaccaccagaaaaagtatctcttaaccatagagattatatcgtacaagggacgtcgccaaggagtggtcatgtcgcatgtttcccgaacatagccataagactgcgagaaaaactgtgttcactggcgcattggccggaggggactctgtcgggggagcatcattggggggccccgagcacgaagccaggcatcgttgtgaggtccttcagagcggatgacgctaccgatggacatgaagagtctatttgaagggaagttgattagccagtgattctcaaccaaagtagtataacttcaaagctttcaaggagtcaaccatacccgaaagtggcgcctgaacctagcatatacttgccgagagtccgcataacaccgttggggccagcgccatattggaagatcgtcacagttcctgtttcagttagcttatcatgcacaccttcattcggggactaagtgggaccaaccaataatgaagcccatgataccaccaacagctgaaaggggagctatgttagcaaaagctcttggtgaacaaggctcggttgttttgtgatcacgtactggaacccatcaggcagcccattttcactaggaatatgtcagcatacttggttcaccatatatatatagtacccaaggaaaaaggacaccacgcggagggtgatctatatcactaggttgtagatgacatactcttctccaaagttgagggagcaccccctgggcccgcttgagcgggaggtccggcaaccacaggcattatggaaagctaaaaagaagcttgtgaattagattaaaaacagcatgcaacagcgctgagccgaatgaaagatctcgttgtgagagtcaaggaacaagctctttttcctccccggcttgatgcttctccgccttcgtcacgtgagtccctaacgggcttgaaatcgcacacgtgccggtatagcacgtgacccattttgcctgtcggcggcatcaagggcgtaggaaacaaatggcactcttgcgctcttgcgtgggttccctcatggcaactatcctcggtctctgatttctttttcgccacgtcttttaaagggctgcctgaagcctgcgccgaggcggcagtcccgtcttgtgcttatatcattgccctggcgtgagcccggtcgctcacgatttccgacctccacacaactccttggtcttgaagcacctattttattccctcctaaatatctctcagttcacaattctaaagtgagtccacttcttactccaaatacacaactattttttgtggggtcgaggcaagacctcgacctaggagtcaatctatttgtctctccctaaacagcactaacgcgaccgtcttgactttagtcgggcgacccaagtttcaatcacccttgcgcgcattcaatatcaccaacccccgggcataaaccaacattactagacgtcctctttttactcttgagacctcctcagaagacggcctacggccccttttacagttcgcaaccgtggacgcgctccgtgctccgtctagatattccattcccttgaaccattcgcatccttctctatgactgccgtggcatctccacctagtgtcgaatcggggtctcgcttgggatggtacagctctagtaacggaggagaaggagctctgtcttcagcgaatgcggacgacgtgtcacggatgttcatgccacggaaacacattcaacgctcaaactcctcgtcctctctagggtcgaactcttcggtctcctccgcatctactgtgaccaccccttcccaagatacccatgccgcgcagaattcggccagtgaatcagagacttggtcgtcatcaaaaaagaagtattcgaaaaatatctggcctagctcgaaatccgagccggtatcaggggtgacaaacgcgcgatctcaggcggtgcctgcgttctcgtcgggcccaagtgcgtcgtcgacaatgtccgcaatgcaccagcctctaaacatcgtcccatcgcaacagatgccccagtcatcgcagcagaatggcgtccgtgcgccaaccggcccaccctcggagaatctagcaattttgattcttttgccgatgaacggcacttttgacaggaaacagatcaatgtaccatattatcccgacgtcctacgaatcgggcgccaaacaaatgccaagacggtgcctacgcctctcaatggtttctttgactccaaagttctctctcgacagcatgctgaggtatgggccgataaatctggcaaaatctggatccgagacgtcaaatcttcaaacgggacatttgtgaacggtcaccgactgtctcccgaaaatcgggagtcagagccgcacgaactgcgagaaagcgataccctagagctgggtattgacattgtcagcgaagatcaatccaccatcgttcatcacaaagtctcatctaaggttgagcatgccggaacttatggcactactcctagtatccttgatctgaactttggggacttggatcctgcctcggggggaggccttcttccttctcccttgagccaaccgctttctcatacgcgcggtagagccggtagcaacgcgagtagcagaattgcccagagtgttgccagcaatcagctcaatgctttgcatcaacaacggcagatgaactactggaattccccaatctctatcgaacaggttgtcaagcggcttacggtgtgtatcacaatttatctgtatactacatatcactgattttttccagggcgaactgaaatccgcaaagcaacagacaacagatctttctcaagcagatgaatttttgacgacgatcatgaaaccaggctatgcagagaaagaaaagctcattaagccttctcctttggagaacagttctcatcgccagatgaatggtcggcccaaaatgcctcgagtcgactccttctccagattctcggatcctcctgcccctccacctcaacagcctctgccggagaaacccgacgcgttgtcacgaagtacatcagagccgttctcaccgctgaagcgcagcgatacagaaaaaccgaagagtggtacaggttctcctgtctcccgcgattctagtcagatattgaatctcatcgaggcgctatcttctgccaagcgagagattgaaacccatggaacacgtgtcaaggaactagaaaatttgctgttccaagagcaggctgctcgtaaattggcagaagacaaagtcaatgaattggagatgcgctcattggatgttgaagtcaaagtcgaaaacggcattgttccacctccagagaatggcgtagacagaaagggggaacaggacgatccagaagcaaccgtacaggttaacggcacccatccttcggagactcccgctcccgacaacagccaggcagacgctcctgtggaagacaagactgctgaacttcagactcgcttggaaataatgatggaggagatggcagagatgagaaagcaaatggcattctttaaagatcgagccgagaaggctgaagatgagaccacggagtctcgcaagtcgttgaacgaaatgattgaaaccttgcgccaggaacgcgccgagaaggcatcagccacggcgcttgacaagaaaaccgatacgcatgattgcgagccaagcaatgggttagcagaacagtcgcttacgagcgatgatattccaacggattccaagacgaagactccatcgatgcagggctccgattcggtcacctcgcaaaataaggacatggatgctgcaaccgcagccacagcctttgcaacacaacgccatcgatacaactatgtacaagaagcaagtccttacgcttctatgtttggcgtggtcttattgggagtaggcctgatggcctatctcaacagttggcaaaagatcgacaaataaaccagcctggcctcgctttcctatccctttgacggctatttctattgcataggccctttgcataatttgactttgtcttctatctttttcagtctttgccagtcacgactttctggcgatgaatgtgctgattcttgtctcgcttgaggaccatcttcttgtcttcatattcggagcatattccctttagcccacactgtctcttttatctcacgaattttttgatgactttctcgagatccctcttgggaatctccttcttggtcgtcttctccgacgtccgttcctccccctctgtcttgccatctcctttttcttcgttcttcttctacctcctaccatgttactattagcctgtcacccttttataggtcgacatctctctttctcttttgtctgtacatgataggaaaagcaggatacattccttgcagcctctctttgaaacgtttcgttcgacaaagggttttcaggcattatcattcatcatgtcatgtcagcacagggctttgtgagcgtatcaaggagttcttattcgtactatgtcgttttctattcatgccatttgttattcgctggcagattcgatcattctccctcttttaacctcttttcttattggagtagtaccttcaacctatagtcctatctccctctctttcattttccatataagtccgtccagcatatacagtgcgtcaagtcggttggatggagcatgcgctctggggaaatcagagtttatttctgaagtatactctcaatgtacatgattttgcgctaggcttataacctaagggcaaacaaattgttccttgactgatcctgatcaagggccttccgcacctgtaatgtggatattgcacctgtagagcggtgagggtggtaaaaaaaggcttgagggctcgactgcatcccagaacaggaattcaggataaaaatctcctgaactgggttactgggtggtgtatagtcaccatcagcgttccatttggatcgtagtcactcagcaggatgtgcgtgtactcaatgttctagcgggtaattctgggcttggccacaggctcatagttggttcgcagcaatgggtgtgaagccttggagttgaacatccagcagatgatggtcgtgcaatcggatgaccgactaatcgtaggagttttgtcggggtgaccgcaagcgaattcacttaaggctgacggcgacttcaaccattttgatccaccttatccggctctcggggagctcggcatcatcctctaccgcggcagcctgacgtttcctcttctttgcggctgacttggattccggcttagaagccgcatctccctggtcagttggggtttgctcttgctgccgttgccgtttctgttcttcttttgctttaatttcttcgtcctcgacgatatcatccacgacaaccacgctccccgtattgacacagactgtgtactcggtttccttttcctcgaaccatttggctacgttcagcgccttctcaatagcccgccctgtcgccttcacaaaaactttctctcgcttctctggtatcttcgacaactcctcgagtatctgtttatcgttcttgcgcgtatcctcgagattgatgtttgctgtggcgcgcttctcggcctgcagcaggagtttctggacgcgcttgacggcgctcatgaatggcgtagtcttagacacatagacaatcttaggtactaatgcgccagcatatggggatgcgactggggcatgaggtataggacgcttctcgactttggcatctgttatccaaaagtcagcagttgtgatccccggttctcagcattggccgtttaggcgatcggatgggaaggcgcacgttttgggagtctaataaggtctttgttctttttctcaaactggagcttgttttccaatagcccctttgccatggctaatatatgccttgcacgaatgaaaatttgcaaaatcaagtcgaagtattagagctgcacgtcttatcgtctgcctttttctgccggccgcccagggtgtgtgatctgcttatgtcatcgcctgttgaacctgcctaattgggaattgggaagctacaactaggtatttctccaaagtagatcggcaaactgtatgatacctaattaggtagcaccttctcactaatttgatatcagtagcctgatcatccacataattatgtagctctatgcacttgttgatgtacttgagtgtaaaggagaaaacctagcgattcgcttcggaaggcccgcggtgtgctgcagaccggtgatgttccgtatactttctactttcgattgaaagggaagtaaggttgacttgaaagcctactccacattcctgagccgcattaaagacgttggcttaagttatgtacatactgtactcaactgttaccatgatccaaacgccccgactcctgtcaggttcttttttcactaagctagcaggcctactgtccagcactgggcccgggtatggggtcattgagcaatactttgtgtttggcagggtggacctaagtacggagtacaggcatggtcatctatttgggtgggccagaagtccttttgatcggatggagttttcaggtgccggaacacgccttatcgcctagtaatacctacaccggcttgttgcgtttcggagagaagatattagctcataaccacactccgtaattcaagagactagtgggcagtggactgcagatctcgaacggcgatgagcagtgtgatctttgttatgattctgaatggggcttctaaccaggtgatcctggtctctcggtttatgtgactatccgtatggagcacacgcatcgagaatgctcagtcaaggcctattcagattaagggcgattgatgtgtaaaggggtactttttcccactccggactccgtcctatatagtttaaagtggagaacatcgatatgaacaggcagttccttctatattgtagatacccaaggggccgcttgggcatctcgtccaatatttaaggaatggctttgataggtgttccgtacattctagttgatcaaagcaccgttgcggcatcttatgtatgtaggtatcgaggcaaagagggtccaaagtgtctgttgacccgagtattcggtagctggttctcgcaatatccatatcttggacggagtaaggagtagggtacggagcactccgtactccatatagagtacaataagggcgatcaccacgtgagcccccgatggtctggcaaattttcccctgaggctggtcaacatatggagtacggattacggtataacatcgaatgtgaaccaaggcgttgacgatcaacacatctaggcttgatggatcgacatacacctcgagctgaaagctgggcagtgatgtacaccaaactagtttgggaaggtcgccaaattggcgggctggtgggtcaactgggcagtgttaatttgtttcgcctgtttcaatgatgaaagttagatcatgtgcatatttgatgtttgatcttcacttttaagaatcccaagtatcaaattgagttgatgtagcaaatcctgaaggttggaaagtggacctacggagtatcatcggcgaacaaaaaacgccttagactagtatgccttaggcacttactgacagtagtatcgtagtcaggttactgtggaagaccataggtaatgtctattaactccggctgtctgcagatgaatgattgacttaaaagcactgaggatattctagctcttgtatatataaaatttgctttatcccatgtgactgctccaacggctcctttttcgagtgcccaatgcaacggtcacaagtgggttcatcaccagggatatatatgaacacaatatagaagttgcaggtatacatactccatattgtgtatgtactatatccaggggcccataggcgatcgaagccaacacaatcgtaactgttcatcggatctacgtattatgaattgaagggttgaaaatagatagggcgacaggatggttcatgctgtactataataataatggacactcatgggtacagagaaaaaaatagtctgtgtatgttgtttttagattttcacaaaggtacgtggccaacatgagccacaatctggaaagatctgcttgcagtgcatggtagacataagctgagggtaatacatagctgacacggaggcaaatttccgagaaatcgcctcttctaaactgacctgtcgccttctgcataaagaacattacactgcactggtgaatatgacagagccaaaatatttggtaggcgtaacggctcccccagttcccggtcacaacgttagggttccgcgtgcactggagccttaaatgcaagacagcactagtcgtctccggaaaggcacgggggatgataatccaatcataaatgtgagctaggctctttggcttggaacctacctgaagaggaaaggtgttcaacgtaggctagtggggtcaacggctgtctctgaagcattccacgccaatggtaaaccataggaatcggagctaatgacatgttccagcgggtcggtgcaggtggagtagctttaaaaaaacagaatccatggatctggactcggatagggaggggtttgtcttagttaaattgattaaattatgggtttcattgatttaaacaaagaaaaataataaataaaaataaatcacacgcaaagaaaaaagaaaaacaatttaaatgattaatgtaaataaataaaaaaatcaataaatcatttaaacaatttggatttccagattttgattctcgcggacttttgcgctcgagtgcgtctccaccttgtagaatggtccagccaaagggcagcagctcgcgcctttttgtatgggactgttcccctccaccgaactattttgaactcttcctcctcaactctccttgacttccctctacattcacttggtctcatattcccagccactttggtcctttctctgtttaacgttctctactcgatccttgaagggagttaagacgtgtctcacgtttcagccggaagctagccattgaagccgctttcttgcgtttttttgcatacatcagatctggcgtgcaggagatccaacagatcccgtgtcgtgattggtttatttctcaagggatatcctagagacaaaagtactcgctagtcgcaaaagctttttctttctttgttggcctccttgtaccccagggctgatccgaccaaccgggtcccctccatcagtcttctattcctctttgggcctatcaggtctccagctaccccttgacggcctttgagctatcccagccgctacgactcataaatatcgctcttttggccactggactcgcattcgtttcttctctcttcctatcttatccctaaaacactttttcttgtcccgacaccagtccttcaaaatattcatagcatgtctccagacccttactatgagacattggatgcacccgacgggacagcattgacgtggatctttgatcattgcttgcgttacgctgacagctacgaaatttcccttcgtgctgcatacgaactcaattgccacccgtcgaagagcacaatgacaccttcatttattcctcgatcaccctccatcttccgcgataccgtttggtccaaaaaaggccacaactccaagtcttctgtcgatgctccttcttatgacactaatgccgaattccgtgcctgtttgagcaagactgtcgccgaagtgccttctcaaccttgcgcgctccctcccagcttcattatctcatttgtgcgccgctgtttctgtttggatttgtccgaagtcgactttgcccaggctttgactgcccttgattacatcagaaccctccaaaatcgctggaaaaaggagattgatgccgccttcaaccgactcaacgtaacttcagaggatgcaagggaccctgagcactcggaggtggctcgcaattatcctaacttgttgacctggtacgaaaacatcagcaacaaggcacgcacgatcgattttctgtacactcaagtctatatcggcctgcgtcgctgggtaagttttatcccgagatcggaatagcgagttgtgtgtctaacgtttgtttctcaggttcttgtcaatcagatgatgctcgagccattcgacaaagccaactgccttgctcttcttaacactctactcccacctgtccaccgagacagctctaccccaacacagcagttgtcgactgccacccttgggctctatcgtgatacctttttcaaatacattaccacctttgaggctgatccttcaatcgtggaacctatcatacagcaaggcgctgcacctggtgatgagaatggatggcctgcattgcatgccaccattgagcgatacatgaacgcagccctcgagatgatcgacgaatgtgtcttgatcaacgagccttgtcagattaccaagtctggcgtgcagcgccgcaccgattcgggtatcagcttcggcgtcgatttcggtccctgtcctactatttcgcactcttcagacaccgaaaagcccctgcctcatttcccggaaccgaccataggcactagcaagcatggttcgttcctggaacgattttcctccctgtcagcatggggcaagaagaaggatcccaagaaggagcagcagaaggagtttgcgcgcagtctgaagaagatgcaatccctcggaaaactcactagtccgactagcagcgccaagagcagcactaagagcatcaagagcgtcaagacaccaccaaagttcaaggcaaatatatctttcgatttgaccgaagacaagcgccggcgtttgattgatgaagcccaagctcgcaaggcagtcggcgctactgaggcggccgaaagcatcggccaggccacttaatcgcaacttctctgcaactcctaccaaagcaaaccagcaaccaaaaaaaaaaaaaaaaaagaaaagaaaaacccaaagcccagccaagggaggggaatcaacgtcccctccctttccccttgatttctagcactcgactcggtcatcccttactcttctttcatcctcgctgcagtcgcccccctgcaagcacaaaaccgagagggagcattcgcttccaactatgccaatgctaggcctctgttgtgcagagccagcctggctgcacttgtgtgacttaccttagtatgtttcggaacaaaaaaaaaggcgtttggacggaaagcatatgggggtggatttacgacttaatgtcttcacgatagcgtccagttcactggatttgaaacaattattattacctttatctttatcattctccctcccatctctcatccagtagatatagatacacataggatcttactactgtagccaatgcgatacaacgcggggtagaatatgtagtcgccatctaggtatactcggggattgggggttgcgccagttgccgctcagtccgccgtagaagctgcgataagatagcgaaacttcccaagtgtccagatcagatcagcagattcattctcgatctcactgccgtctttgttgagatccctggttatttggggcgtgatgattgtaaatggattgacctgcatatctgctaattaggaagcccaccctacatcacatacggctcgcctgatacgaggctatcccctataccatacaacagatatacacaactgccttctcacactacattgcgcgataatgagggttcctacgggatctcacattccctggcagtggtatgccgtcgtcggagctctgctaccaggctgggttgccaatgctagtccagccgtgaacgtggcgctccaagcctcctttgactcggccccatacctcgtcgagctcctgtacgttgcacattgagtgatctctcgcctgggatatatatgtcaatatgatggctaattaattcaatgtagggagtctgctgcagaagaaaactccaccgcctattttcctttgttggatcgcatcgccgatgggacgtttgaggacctcacaactgagaaggagctctacgaccgcttcttgacagttgtgaaggatgacggccatattcggactccggagggtctttcctcgttcaaattatcgctttcggtccgatcatcggcgcctcgtattgaggcgcacttccagttctataacacctcagttcagcagtccttgatggtggctcaagatgcggtgtgtcccgtgtgggttcactcggaaggaaagcagtattgctcttctaccatggagcgcgcacagcaggacgttgtcggagaattgtgggtagagctttgttcgtgtcgcatggactctaatagctgacattgaatttgtgcctttagggatcctagagagctaccgtttgatcgtgtcctaggcgatgcatcgctcccttcggccgttctgtacgcagatatcacctctccgatgttcagagattttcatgaaaccctgagcgacatggcaaaacagggacaagtctcgtaccgtgtacgctatagacctccccaacactggatttctcgtcccttgtttgtgtctggatacggcgtggagcttgctttgaagcgaacggactacattgttattgatgaccgtgatgcagagcagctcgaagaaaagggcgcccaaagtcttccaactgacccggatgagaccaaggaagatgctccaggtgacctccggcctctgtcttcctccgatgtgacccgtctaggcttgaactctgcgggctacgttatggacagcgctgatcctttgggaacattgatcaagatgtcccaaaatttccccaagtattcatcgatagtagctgcccacaatttcactggggaaatggcacaagagatccgccacaaccggttaaaaatgctccctggtggttacaatgccatgtggatcaacggtgtgcagatggacaaacaacagattgacgcattctcacttattgaacatcttcgccgagagaggaaattgattgagaaattccgcggcctcggtctctctgcggatgatgtcgtgaagttactgtcacatcgactcctcactgaagctcaagctagtggcgaggagcaacggtatgactaccgggataatttagaagggaaccaggttatcatttggatgaacaatctggaaaaggactcgagatatgagtcctggcgtggtgatatcgagggggttcgtacttatttcgtatggctattggacggaattcatattaacataattctagtacatcgccggctcttacccgggacaattgcctccggtgagccgggatctgcacaatgtcgttgtttctatggactcgtctaatccagaacacatgatgcttgttgctggaaacttgcacgccttcatcaaccgaggaattcctgtgagattcggcttggtacctaccatctcgtcgccagagtccattgcgcagctgaaggtagcgcattacctttctgatgcatatggcatagagtctcttgtgcaatatttccaagagtatgccgcgaaaggcaaaatgggcttcccagacaaatcatgcttccagtctgcgactagagaacgcgacctggttgacgaacacgaagctctgtctcttgatcaagtcttgaagagtgaaaagtatgacgctgtggtgtcccaaactggtgcttaccagcgtcggttgagtctgacgggcgacgcacctcaatttctagtgaacggtatccctgtctcccgagaaggcaactggatgcagggaatgagcgtacagatcagcaaggacttgaaattgatccagcaaggcattgttcagggaattttcgaggaggacacatggcttccggagtttttcctagctgacgcattcgcgaaacgcaatactttcctcatgcccgaggatcccaagagtgtacagattgtggacatcgctaatattcttgcctcggatgaagatgcattgagtaagactcgtgttctctcagacaagggagccctagagagcactcatatgatagttgtgggcgatttcgagtcagaggcgggtgtgaaactacttaccgatgctcttaatcttcgaaaggagaacagtgacgtggagattctgatgctgcacaatgcggcatcggacgccgaggatgatgcccccaagaatctcgctactctctatctctcgcttgcgaaggaggaaactatcgaccaagtactggctaagattgcatccggtaatcttgagactgaagtccaagatatctctaccattcaaactttgcaccaaatcctggccaaagaacttggattcaaccctggcactgagggacttgttgtcaatgggagagcagtcggccctattgagaaggaacatccgttgagtgtgggagagatgagccaactgattgcctacgaacgggtgaaacgcctcgattctgttgcggcagctgttgaggaactcggattcgcggataagatttcaaacccgctcgatttcgctaaattgacatcgcttgtggctctttccaccatctctgatgtccctgagggcattttcgaaaatactcctgatttcagaatggacgtctccggtaaatggaggacggagcactctgttatcaccatttccaactccgatgatcccacgattcacgttggtgttagccttgacccagcatccgaggttgcccagcgatggtcgccgattctgaaggtactgtccgaactctccggcgttcaactgaagattttcttgaacccgaaggaagagctcacggagctgccagtcaagcgattctaccgctatgtcttggaatcagagccatctttcacggataagggggctctggctcggccgcaggcgtcattcactggcgtgccagtcgaagcactgctgactttgagcatggatgtgccgtcatcttggctcgtagcacccagtgaatcagtctacgacctggataacattaagttgagctcggtcaagtctggtactgatgttgatgccgtctacgctctcgagcacattctgatcgagggccactctcgtgatcttacaacgaagactccacctagaggtgtccagcttatcttgggcactgagaacaacccctatttcgccgatactatcatcatggccaacctgggatacttccagttcaaggcacagccaggcttgtggcagatcaacttgaagcccggacgtagcgagaagatcttcaagatcgatagcgttggtggtctaggatacaatccgcagagcggtgacgagaacaatgaggttgctctgctatccttccatggtcggacgctattccctcgactgtcgcgaaagccaggccacgaggaagacgatgttctcgagacaggagtccagctaggctcaaagatggactattttgccaaaggactcaactttgcatctgacgtcctctccagtgttggtgtcgggtccaagagcggaggcgaacagcacgccgatatcaacatcttctcagtagctagtggacacctctatgagcgcatgttaaacatcatgatggtctcagtgatgcgacacaccaaacacaccgtcaaattctggttcatcgagcaattcctctccccatccttccgcgccttcctcccttctctcgcccgcgaatacggcttctcatacgagatggtaacatacaagtggccgcactggctgcgcgcccagaaagaaaagcaacgcgagatctgggggtacaagattctcttcctggatgtgctctttcccctctccctggacaaagtaatcttcgtcgacgcggatcagattgtgcgcaccgacatgtacgaacttgtcacccacgacctccaagaagcgccctacggcttcacgccgatgggcgactctcgaaccgaaatggaaggcttccgcttctggaaacaaggatactggtccaccttcctccgaggcaagccttaccacatctcggcgctgtacgtcgtcgacttgaaccgcttccgcgcgcttgctgctggcgaccgtctgcgcggccaataccagatgctctcatcggatccaaacagtctcagcaatctcgaccaggacctgcccaaccacatgcagcatcacattcccatccatagtctgccgcaggagtggctttggtgtgagacttggtgttcggatgaagatttaggtgtggcgaagactattgacctttgtaacaatcctcttactaaggagcctaagctagagagggctaggaggcaggttcctgaatggacggtctatgatgatgagattgcggctttggcgagtcgcgttgctggcgagcaggctgctgctggggttgagtttgtgcagactggcgaggaccgcaaagatgaattatagttgacccggtgggtttcattggagagcgattgcatttatgattacacttgttgcatttattggattgaatagtcaatctccgttacatttttatggaagatttcttctactgcatgctctcataagaattgacatcctagcaaacaagtgtataattgaatctagaaagcaagcaatagcaaaggcaaaatcttcatttcatgaagtttcacagctcttccgagtcactctcgtacttgaagtaaacttcgctgtcctcatctccgccgtctgagtcatattcatcgtcgacagcatcagcaccgtgagaaacaggtgatgtgggcaatgggaatgcttcgacaacagaatgagagggcttgaccaaagaggtagggctgccaatggaagcttgtttctgcttcttggactttttcttctccttaggggattcattactgccagatgcctggttagcctcctcggcagcgagacgttcctcttctaatatctttcgcttcttcttctcctccctcctcttccacttttgctctttgcgtgcggccttgtcttccgggacttcttgctcaatctgctctcccttttctttctcttgcctcttcttctctcgttgctccttcttctcgcgtttcctctccttcctctccttcttctcgcgcttcctctcctccttgctcttttggggggcgccgggagatgacggggctttctcgatgggaccggacgcggaatcttcattgtgcttgcgcttaaattttgacttcatatcatttttgagaggtgcgggcaagttgggctcaccctctttagactgcgcttcgtggtcagactcggcattggcattgacaatggaagatggtgctgcctcatcatggggctttgagctcggggtggtagttatcatgtcttcgtcgtcatcagtatcctcgttcacgaattgagagctcttcctttgcgtctccaatctcatgttccagtgggcacttttcttagcagcgagtttgggatcgaacaccgcgtctggctggccattggcccgcaggaccatgacctgtttcacgatcttgcgccatttgtctgcacattgttgtcgagaccgcacataaccaatctccttgctaatgttaccccatacaatgaggcgctcatccagctcgtacatgtccttgcctgccttatcgggaagcattggcttcatggtgacccacgtcgattccacagcgtcaaggaacatcttgtgttcttcctccgaccacgcaccttggttcatggtgttctggtgctcgagcttgttcttccagcgctgagtgacatcgtcatcactgcgcccaatgagcttaccaatgaaagtccatttcggaccgtgttgggcgtggagctcgataagctcatcatcttgttccttcgaccattcgtgtgccctttgagccgaagcttggaagtgtcgacgcatgaatcggtatacagatcgccgatcacgatccggaagaagagcgtagatctcgtcccaaaagtcgcctttgtggatgccatatgagaagaatggagattcgacgcttaattcacgggtacgctcagaatgctgaaccatctcgtcgaatttggcactaggaatgccatgcatggtacagacattgactttgtacgcttcgatttttcgcacttcatccggcgtatagaagccaattttcaagttgtccctctccctaatgcgcgagcttctaactcccttggtcttgcctcctggcgtgttgctatcctcagtgttgggcgagtcaggggctggagttcgcttggtggcagccagctgctttacagcggacggtccttctgcaaccgttgattcgagagtaggttgagcagtggatgaagtgaggatattcaagtttttgccattctgcttgcgaaccttctttgacgaagacttaggctttgatgtagtgggttggctgggagtgggggcattgtgaatagcaatttcaaagcgggttgagcttctttctggtgaaggtgactcggcaacggagttttctgatttgcgaggcttcttgatcttttttttgcgctcaggttcagagtcgcgctttcgctttgaaggattcgacatgttcgagtctaattctgagaggcgctctgtaccataggctttcccaatcactggagataatgcttcggtttctgatgatatgtgttccttattatttttcttcgtcccgccaaccttggggggattgggagtttcagggactgtcagattgcaaattttagtaccgagtcgcgtgaagatcaagtgatttcaccaaccgatatctccaaaatcgtcagcaatttcagggtatggttcgagctgagaagatgtatttcccatggcaatgagctgcaacaatgagtagggaggggggaagattagctgctgcaatgaaaaggagagaccaagcttcttcaaaatttacagcatgcagcgcggcaattgggttcaccgctgaagctgaccgcctatgtggaactatatcaattgctacagtacaattgtcgatggttgtaggagaacaatagaatcacaacgaagaaaggacttgagactaagataacatttgctaaaaatataaagcagaattattaaacagtcccaaataatggctggccattgtacaactttacggagactcatgtattccatacagtgttgcataacaaatctattatgtattcagacattgagcattcgttgaacacagtgctggcaggtatcatgctcatgattgcattaatagtgtacatgctggcataaagaacataagaagcaaatgcaagtcgtgaaaccaatactctaggtcctactgacacagtcaggacacgagcttcatatcccttaggattttcatcactagtttcttttggtcatgagtgtgaagattttgttgatcggtctcctgtagacagcgcccaattgcaacagtgaccttgacagcactttctgcagcgatagagcagtccacccacacctttccattgcggccaactgcaatctcaaatcctcccaagctctccagcttctttccaagttcagaaagaacagccagcccttcaattgcatccgtgttctcggcagaagtggagcttgctcgaatcaaccgggccgccataccagttgaaacatcaaataccattccacctgtcaagggtcccaatcctccatcagccttgccagttgctgggttgacacaggtgagttcaacttcggcgccggcaccgagtcccacggactgtacccgggcatacaccagctcgccttgcttcaacattggtcttgtcttcttggatgcgccctcaaaggacagctgacccagaagcgcgtgagccgtgtgtggagttaccatgcagtgaaagaaatcaacgctggagtggtggatctgagcaatgacgaagtcgttgacggtgggaatgtatcggcgattcgggaaagaaagaagcgagacggtgtttcgtttcgcatcggtcgtcaacagaccggcctgtgttgctgttaagacatgattggacccatttgaagagggctgtgataggatacggaggccggggcctagtcgtagagggttggagttgttggtaggaagatggtcttgaggtacctcatcgctaggtaataggacaagggcagtcatgatgctagactgatagctgtattctgaaaatatcctcagtgtagaatactccgagggaagaggatcaatgcttattgctgaatttctctcaggcagtctcaggtagatagatgcgactgcttttgcgcattgatcctgttggaaagaaaacgacatttcttatcaccatgtgacctcaatgaatgcccgcgatgccttatcgacaacgccacaaccactatcgataactattagccacatttgcggcagacgaaaatcttcaaaaatctttttcgatcgttccccctcaatcgagatttccaccaattacctccgatacccccggatctactctcacgccgtaacgtgagatccttgttctttcaatccaaaaaagtacatatttacaacttcgacatgggtgacgctgccaacagtgcgcccgctgaggctgagcgctttgctatcggtatctcctttggtaactcatgcagttcgattgcccgtatctcgcctgtacgtcctgatattcattctttgggtcaaataactgtgactgacacatttataggagggcaaggctgaggttattgccaacgaggagggaggtgaggacaatcaagccccacgatttgagaatttgaattaacatactcagatcgtcaaattccttccattctttcttatatcgacggcgaggagtaccacggcacacaagccaaggcccagcttgttcgtaactccgccaacaccgtcgcatacttccgcgatttcctcggcaaggaattcaagtcgatcgaccctactccctgccaccagtcggcccacccccagcagcagggctcgactatcgcgttcaccatccgcgacacctcgagcgaggcccctaacactgtcactgtttccgagatcaccacccgtcacttccagcgtctgagacgctccgcctcagactaccttggtaaggatgtcaacgccgccgttatcaccatccccaccgatttcaccgatgcccagcgtgaggcccttgttgcctccgctaaggctgctggtctcgacgttctccaactgatccatgagcccgttgccgctgtcgtggcttacgatgctcgccccgaggcgactgttgtcgacaagctggttgtcgttgctgacttcggtggcacccgttccgatgttgccgttgttgcctgccgcggtggcatgtacactattttggctactgcccacgactacgagcttggtggtgcctccctggataagatcatcattgaccacttcgccaaggagttcatgaagaagcacaagactgacccccgcgaaaacgctcgtggtctggccaagttgaagcttgagtgtgaggccacccgcaaggccctcagcctgagcagcaacgctcagctgagcattgagtccctggttgacggtgttgactacggttctaccattaaccgtacccgtttcgagcttctttccggcaaggtcttcagccaattcactgctctgatcgagcaggttgttaagaaggccgagctcgacgtccttgacattgatgaggtcattttctcaggcggtgtttcccacacccccaagctcgccagcctggccagcaacatcttccccgagaagaccaaaatcctggctcccgccacctctgtcactgccgttaatccctccgagctgtctgctcgtggagccgccttccaggcttccctcgtccaggagttcgaccacgaggacatcgagcagtccatccaccctatggtcactgtcacccctcacctgactaaggctatcggtgtcgagttcacctcccagaccgagactaccttccagcccctcctcggcgccgagactgccctccccgcccgccgcatcgctcagtacttcgcccccaaggagggtggcgatgttcttgtccgcgtgtgcgagggtgcccgtgagatcaaggtcaccaagcctgagcccaaggctaaggaggacaagcccgcccaagacgaggatgactccgatttcgattccgaggatgaagaggaagaggagacccgcgagatcatctggaagaccgagaatcccgttgctgagctcgccgtcaagggtgtcaaggctggcagcaagatcgaggtcatggtccacgtcaacgccgatcttggtctgcagatcgccgtccgcgaggtcggctcccagaacgctgtccgtggtgccgtcaacggctccgcttaggttttttttcctcgtgaaataaaaataaaaatgttggatttcgtttatggtgtgatgatgcatgcatgactgatatagaggctgtgatttttctttttgtccacgatttgtactgcagttatcgtcatggagtctttccctttattagttcttaaatagactcagttatatgcaaccaatcaatactggttctcttttcagccagcttcactctgctaggccctattcatttctgacgtatcagtcgacatttctccttctgctctacaaggaataatcattgagactagctttgctccaaagcgtggttacacaagaatccaagctatatgactttataccatttacatcgcaaagatcatcaaataacggtggtagatattatattacaactagattagataggttcgcaaccgaaagcacaaattcctgcatgatcttcaaatcggggagaatcatcgaaccatgggattcatcaacagatcatcaaaggctcgagtgccttagaaaacataaccggactcaaggcagggagagtatggcgcgaagaatgctcaattgccatcttatacaggaaggccgtagatttatcatgtggtaaagatcgtgaggggttcgtgatagcattaagcgagtgtgggtggttcgatcttccaggctgcatccgggtctatcagatgcagattgacaagatcgaagtgtaacaagcggcctcctgaagaaagaataaactctcaaaggggatatcaacgcgggaatacaaagtcgtgtgtgaaatggtccagagatcgacgttttgaagtcgacattttcaggtgctccggctcgttgtcgaaatgaggaagcgggcttttcatggcttgaggtatatccatttaagcgaagctggtgccctccttcttctggcttttcacgctgtttgagcgctgcgaggagaagaaaccacggcggcgctccttgcgtccactgtatccaccgctggtatcttttcggccgacggcaccaccgaggcagtacatcaagcatgaaaggaactggcaaacggatgcggtccacatgaaggcgaatgccttgacaccgaggtgtgcgtcctggccgttactcttgaacgcatggcggccctggacaaagacagcactatgaaatatagttagcattttgtctttgggacaaactaagttccgattatagtgatacatacgtcatgagacaggtcgtgatgacctggaaagtcaaaccgatccaggccaggaaaccggagaggtagctggcaatgcgggtgcacatggccagcataccagtgaagaaagagcacacggcgaagaacagaccgatgatgatgaaggggaacatgaagcgcgacatcaagaagtagtgcttcgatctatagcgcgcgtatgtatggttagcgcgacccggtaaattaggatatatcagttggaaacctacccgacaaactgatgagggatattttcggtcgtattaaagttacgatggcttggggggtcgaatgggaaatccacatgggtctctccgcagtcactcctgccgttggtcactccacagaggttccagaatgtccatcgcgaggtcgatgctgcgcctgggatatttcccgtgtctgcctcgaggaagtagatttggttcagcgggttgctgttgcgtacacctcccaacagagtgaggaagatcagcaagatcgctcctgccatgaaaaacaggcccgtaaagcccaatgttgctcctagagacgacgatcagattaaggtgttgtagagttgttaatcaggggtcaatcaacttactgctgaaacccattttgtttggcgcttattatagatcacctgggaattgaggggcttttttttcttttcgaaggtttgtctctggtctcaaaaaagaatgagttgctcaaggagagtgtcaagatatgaaagagaaggtgtcagaaattgaagcgacaaacgctagctggtatatggatacatataagagcagccggggtatccgggaccacttgagtagtgtgatataatgacgagtgggcatcatcctgctctcctcttctctctacaaagctcaagcccatcgacgatcataacgtcatggttgcacctgatagactagccgttcctagttagcttgcactatacttcccgcgctagaccagatcgggttagtctcaggcggtccatgacgaggtcaacaaccaaccgacgttgcacctctcgcaacaacattggccctttggaaggaaagtgacgtggaccatcgtggaccatcacatatgaaccttccaagatttcggtcttacccactcctgtgccttaacgaaaaaaaaaaaaccttgtctgcccaacccaatccccagactcgaccaagggtacacactgcgtacctcccaacccgtacaacgttgtaatggcgacctgggcatacccgccactgcccgcagagcagatcaaccgtgaggcggacactgcgctggtatgtaaaacaatatatggacccctacaacaggcgatctcttcatggaggcctggttggctgtagctatgatccatgaaggagtgtggagcccttttagtataatgccaacaacgtcttatcttaggcccgagagctagaatggctattgcattcgctgcaggattcacttgcttcattgaaggaaggtctgcaagaatgcgtcgccctcctagctccccaagaaccggggtcaaccttggtgctgtcctccttgcggtcggaaagtgtcaagggcttcgtgactagagtcggcaccaaggtcgtgaaaggcgtatgtatcttgagtgtggggaagaccaatgaatatgcaactaaaccgatatccttctaggatgttcaacttcgacttgcatcgctcccgcctcctcggggtgcccccagcacccgactgaacatatcccagtcccctggagctccggaactcgtacttcgacagctggtatcggttcgagatctcgtggctcagagcctggatattgtggatgtgagcacgtggacaggcgatcccctcaacgctggcttcattttcagtcaactacaccttttgctcgagacaatcagcgaggcgcgacaaatgttgaaaggagaaagcgacgagacgcgaggcaagtggtgggataccagtgccaccgaagatgtatgttcgatttctttgacagaagtacttcgatatttttgctgatatatatactacacagatgtttgaccctccgcttccgccgcatctttctttccatctctccatcacagactccgccctggtccttgtccttcggacactggagcccactgccctcaatcacgcgccaaccgctttttcctcggatatctctctgaccgggttctcgctacgagatcggatattcggttcgcgagcgccaacccatgatgaggccggtagcctttttcaatggcagggagaagaagttcgtgtcaaggagaaggtgcgggtggagagccaagatcccagtctgatggcggtcatggcgaaactatcggcccttgagcatgaggtgatgcggtgcgttgctgcgctgcgggtgctcatgggcgatgaagatacagagagcgaggcttagttatttgattgataccctactgcatttggattatgaacagctgcttgttgcaacacttgattcattcagtattcgagttagggcctttcgaagtattgaatgggctgtagtttgagatatgtttttagcggccaccttaaggcttcctagggctaggactttgttagcatgccgtatgaaataaatgataccaaaagcacccagcaatataaccgcatattcctaaatatgtaccaacaaaaaaaaaaaaaaatcatccttggatgttatagatctttgataggtaccgagctacatagaacgcgaccgggggaccagccaatgagaggcccgcagtttgtgatgggcccgcatgaccatcttggcatctttttttaggcttggccattttctttttttcttctctcaacctctcgaaaagggactgtcgacaagagttggaaaatgttatcctggtcttcagcatcaggcgctagtcggtcgcaatcgcgcgaactatttcacaccttttctcgcccttctggatcgcgacagctccgcggacctgccaaccgtgtgatacctacaccgcaacgcactttcatccagaaatcgtcgcctttggtcgcgtctagcagtttggcgcaccgaaggaacacatcagcacaatgtcagcctcagcggaggtttttgtcaggcccagtatccgccgacttgccacctcaacccagccaatccaccgaaccagatgatatcaatatcctaatcgatcgaatcggcgaaaatgaggcagaaatggtacaaatactcgaagagctggaaattatgggagaagagggcgaaagagacgagctcatggacctgatcgcccagcgagacgaacacactgcagagtcgtgggtacacatgattaaacagcgctttggagatgaaatgccagaggggttgttggacgatgctgagctccagatatacgcccgcctctacggagaaccaattattcgacgggaagtcgaggaaacggttgaggaagaggaagatctgagcttgctccgcgaagatgggcaaggaggatgggaggaagtcgatttagaaggaaacgctgtcgccgaggacgaggccccactcgtctatgatatggaattttccccggaagagcgggaaacacttgccatgcagcggaccagagaagtggcagagcagttgggcggcgaggtcatgctcgaggaatttgagaacgaggcagttcctgactccgctccaagaatgcatccactcaccctcgagggaaaatacggaactgatccttcaactatccatctgccccaggatactgtcactggtcccatatcggtaattctatcggaattccccaacaagcacatttccgagactgctcggcgcctgtttggaggaccaggattgccccattcgagtacaacggcacctccacgtgcccaattaccacagcttcctgtcgctcttcaggcttcgcagcgtcaaatgggagaaatggaggccaacgcatacttggcagccctgtaccctgggatctacgcatcgaccctcagtgttatggttgagattcgcaagcgattgggcgtcgattggatccgccgtcttatcgctcaagagggtgggccaaacgttcttgatgccaacggtggtggtgccggcatcctggcctggagagacatcatccgcgcagaatgggagctcatggtgcccgatcatcccgcgggagcacccatcccatttgggagatcaactgtgctgacaggctccgatgctcttcggctgcgcgcttctgccatcctggaaaacacgactttcctcccacgactacctgattacgtccatgtgcgcgggaagcctacaattgacgactcgcggaaggcccctaaacgcaagcagtacgatatcatcatcgcaccacactctcttctcggccttgaagaagaatatgagcgtaaacagcacgtggagaacctatggtctcttttgaaccccaacgggggtattttaattctgctcgagaagggccgccagaagggcttcgaggctatctctggcgctcgtgaaatgctcttgaagcgccatatcgcaagccccggctctaccgaatttgacaacttcctcgaagaccccgaccaacgcgaggtcattgagaaggagcgcggaatgatcgtggccccttgcaccaaccactcaacctgcccgatgcacaattctgcaggtgctactaagggtcgtagggactactgccatttcgagcagcgatacattcgccctccattcctgcagcgcataatgggagcgaaagaccgcaaccacgaagatcttaaattcagctacctcgccgtgcagcgtggcgtagacctacgacaagagcaagcaattcgtcaagattcccaggctacagatgccgcatttgaagggtttgaggaccctgaggagtctgatatccctaacaaaccagccttccacgctctgtctcttccccgcgccatttacccacccatgaaacgccgcggccatgtcatcttcgatctctgcacacccgccggcaaaattgagcgctggaccgttccgcgctcttacagtcgccaggcctaccgcgacgcccgcaagtctcattggggagacctgtgggccctgggagccaaaacccgcatcccgcgcaacctgaaccttggcgataagcatggtgagggtaagaaggagcgtctggcccgccgtgtggcgaccaagaattctatgcgtgacgcagaggaagagggtgactttgagaatgaaggagaggaggaggatgaagactatacagttgatgactcggatattcctgatgtccctgtcaaaaagaggggccagcatatccccagttggaagaagcataatgataaaaagaagcttcgtcaagtgtacaacaagcgttctgccgacgaataagtggctttgatttggcgcaattctttttttggggtttggatgttcgaaaacatgtactatactaactactggcagcatttggcattgggacggggggcggattggatcttgtttgtacactaggatattattctcacttctacagatgtaaatatagcatcttcactctaatcaatgtttgataggtatctgataggcgtcatttagcccagagttaatttccctctccaatgagacggttggggagacggttgggcattccattaagtcggtcgtaatgaagcaaagtcttgtcacgacctgggggaactgagccaggcccaagaagcgccggtagtcacagaaaccttgtctaagctctgcaatgcacaggccgttctttaaaatgcaccgggcgcgcggggcattgatgttctgagaaagacagccgctggcttcatgcttggtactgttctagccagagctggcgcaccatccacagtcaggaatgacatggatagaaatcaaatgaaagtcaggttggagccaaatcctactgacaagctagtcggttttcgtaatagcagatattcctatctcgcaaagtgacaccgccacattcactgcgctgccatactctttcgcaactgcctttgcttctgtgtgctttgcaactccaatcgatcgactgcaaatttgagccgttctttcttctgcacgagtcttctcagctctgctgccttggatgctgctgcattacccgacgagccagcgctggaccccaccatgcgaccccgcagtgagctgctttgaggttggctgcgagtagctgatgaccggctctccggggtagacgagagtcgaccttcttgaagatcgcatttcgccttgaggccttgttcgcggcgcgcgagcttttcaacatggttcgatgatagtgtgaggaggtgggcgatgctgggagtgatttcgtcaaggagggattgctgcgcttcgcgtaatgtaggctccgggaggagttcaaagtgctattcaaagacaaatggttagacttatagcttcttgtttctcctcttggatgacaccttgggagagcatactcgagttgtctggaggactttgcataaacgagggaaatcgttcacgcccgcatcgagggtggatatagagttgtccaagatctggagagaggatcgtaatgaggtaaccgaggaagacaatgaagctgccatagtgtgtgatttgaagctcagtttggagatggttgtttacagtggtcgggatagatcgggctgtaaaagcggcatgacaccgcctttaaggcggcgtggcctcgggaccgggcaaacctcccaaacctcacttctcctcttccgtcctcctgcctcaccatcttcccgaacgccgaattctccccgcattcgattcacctgtcaaaatgtctctcctcggaaagaagttccccggcgctctcggtatgtgttttttggaccacgatcatgacttgtccgagaacgatatgaggaccattgactgacgcatatgctcttttacagccacacctatgactcccttcttcgctgccggtatgcatgcccttgaaaatccgaaattccctgaaaatccgcaacgcatggattgccaattaagaacactgcaccctttcagcagtcattgatggaacattactctgacgattctcctctccaggcctcattgtcctctacggtgtcaactctctccagaacgctctgtccaacagtgagtccactccgcacggctattcatagatgacgacgattttgcggtcacatgcgacaatatccacaaaacaacgctatgatgagcatctgcgagcatcagctactaaccttcatatccgtacagccgctcagtacaagaacgacccccgcaacgtcaacgctaagcccgctggcaaggctgaccactaaattgggtcgacaatgaatgcattttgagatcccacttgttcgttgaagaggagcgggacgaaccgtcgcgatgtgtgggcggacggagatggcctaggtcatcaatggccggcttgcactttttgtgattactctgcgagcagttttcccctgttcaagcatatagagtgtacccacttcgattggggtgacttggatcaattcacaaactgtaccagtaccgttctgagcaaggcgccttttccttttgtagtgtctcttctgctggatgatatcctatatttcagagcaaggaaagtaacctaagccgaatattccggagcctgttgtattgcaggtaaagctatagggtttggaccgtatacttcatatctgctcattgcggcgctatctcacttagggctagtttttcacttctttgcgaccgcgcaataagtcgaaattagcccttattcaatgctttgtcatttgattccaattgtaacagctgactatccctagtactagttagtagggctttgataccgctctcttgtatcaaatacgctaaacccgatcgggcatccagttttcgccaactccgcctggccgaaggacaatcattttccgacctcaactccgcaataaccccaattaaacacgccaaaatgagcaaaacgactaaaatggcagggcttttccggcccaagaagcttgatctctctggatttgtcaatacccgcttgattcgggacaacaacaagcgcatggccttcgagcagactgagccagaacggtacgaacactgtccatctcctagatgctccagcttgaccgaggatggctatcccgagctggaaaatgcttggaattgaaaaacaaatgctgactctgtcttccttcgcagacaagctctccgctacatgatccgcaacacctctctctctggccgagtgcgcgcgcaggctcagctccaattggcgcagatgcacccctatactcgccctacgcagatcaagaaccgttgtgtggcatcaggcactgcccgcagtgtcttccgcgatttcagaatcaacagagtaagtggaagacttcagccaatggcctcatattgctaacactatatttttctacagtatcaattccgtatgcaagccctcgctggtgaactccccggcgtgaggaaggccagttggtaattgtatgagattattgctagttctctgtaatatgtggagaaatctagttgaattgtttgcacgatggcgttttcttctttccttccatggggtggaagcatgtacaatatgcatctctcattagtagagaaatcaaatctttctttgttatttttggatcctccgattcaaactctgctactctcggcgtaggaattgacttattgacaggcctaggcgttgcctgatcctcgtttgctaatgtcgtgagatcaggctttctttgttggcagtgttgagaccgtctcaattgggttgtttgcttctatcatggtggttagttgcagatcagcctggctcatttgattgatacctgactgataattcatcatatcagctcagtggtggtgtatatcatcctcaatatcggcgagaagattcttcatgtccgcatcatccccagtaattgcgcaagtagggagctcctcgatacttgccataatcatatcgtgccctgtcctgaaatcactttcaaagctgcggtgccttccggtcctgctcgtataaaacctcccacctcttcctttcgttttcttcttcctcttcctcttctaattaaccatcactcataaacatcacccatcttccccttttgtccctttgaccttcttctcaaatcaacctcacacattgatttgaagcttcgccacaatgaacagcattccggaggacctcctccccgatgacatcgtcttccctgaagacctgctggagcttgggtaagtttttccgtggttttcaaggtgacatcttagccttggagtctaacagtctattgaatggtacagattcgtcatcaccaaagatgacaagattcgttacatcgacgccccgggccagggccctcgttacaagatcaaccgaagtgaccgcataaaccaggtccacatcgaggcccttcacagtgagtttaccattagattcatttccatcctaggatgtggtttggatgaatcatttggcgctaacaactccacagaagcgattcacatcagcatcattgaccgcctcctgggaatgggcatgcatttcatgaaggtccccgagggcagcaagcagcagcttcccatcatggtgtcgggcaatgtgaccgctgcacctcgaattgttgttttcttcggtgagattgtcgaggacctgggtgtcttctcgtaccgtgacgcttgcgatgacggtatctctttcggttcgatcctgggctttgcaaagggtctgctcggtgagaattctctagattcgccgaatgctcttattcttgcgaacgcgggccaaaccgtctggtacaatggaaatggtggctcggcgatgaccacagacagtcttcatggccaacatcgtgcctctgccgtgcaccgcgaacgttcactgggtgcccgtaacatcattaggggcaacatttccattgatgatcatgtccggaatatctttgagcaagtcttgatgcgcagtaacttccgagtcgatgccagaatcgacgtcattggcctgtctgagggcggccatgctgccatggcatacctgaagaatcgatgtgagtgtctgactgaataaaatacctagagttcgcttactgagatggttctagggagtttctggatgccccacatctcctccctgtccttgatcaaccccgagacgattgttagcactgacgccaacaaggcttccgacccaaaggagaatgacttattcggctggttcatgaaataccgttgccgtggctggaccatctgtgatcagccgattggtacacgtctgcgcggtcttaccctccctcatggttgcaacacgtactcctccggcgaaggcacgaagtcgtcgggcatgattactcgtggtgtgggacacatcttgacctggatgaacattatgcattactccccagcggctatagagagatttgatgtggtcaagggccagtataatcccaacttcgcagctgagctcggagcaatgacctacggagaccaggcgcaactccctagcggcaagattgaagtgcacagcctggatgttatgaaacagattaaagacttcctggccggcgtcaatttcaccgaggaaatgaccacttttttcaatgacaagccgtacttcagtgacgatagtgacaacgaaagcgataacgacagtcagcgttcggtcgtttacgcagataaggacaatggtgtgttcggcgtccctcctgccattcctggcactcctaactccttcaggtgctcccaacactcctcctgacactcctgacgctcctggcggttctggcgtttctggcactcttgacatgcctgttgacatgcttcctgatgcttcctctggcacttcccctggcacttcctctgatgcttctggtgttcgtgatgttccttccaccatccctggcggtcctgacgttctttctgactttcttgctgacgcactttcagttccggaaagtccaacctactatgacgacgtaatcgtcggtaagactggcccgttcgacctcagtgatctgcaggccatccgagaggaggacgaagggcaagagtaaattctctgagtgtgccctgggtttcttctggattttttgtttcccggtgttcctaccggtttatttttgcttttgcgctgggattattcgcgagcagatgcatgttctttcctccctacttgaggtcaattgactagaaaacacaaaagcacaaaaaaaggagggaaatgaaacccatctgcggaagcgaatcaataaaacctagcgtatcaatttcccaggccatttttactgtatgcgacgtgagtacatatgtacatgtaagtatgttgggatagaacggtggaattgttcaatgaaaacccggcaaaatcagggccaagacggccacgacggtcacgacggtcacgacgcaacattctcaaccctttccgagacaagcatttccccccaccggaacagttttgatcgagtaagaagaattggaccggaagatgcccagacgagaagacagtttccatcgagtaatctgataaagcgggccattgataagcggcaattgcccggagattccacatcggaggtggccgacggccttttctcgcctcgatcgatatgctatactcgtctcaacatgccaatatcccagagatataaaggcacaggggcatggcctctcaggtgcttcctcgtatggcaaaggtgaaggccattctgcagctgcatgactgtccgaaccggctggtttgcgagtacataatggcaacaccggggtctggaataatggctcggcagtgggcctgtggatattctcaggatattccctgggtaatccccttcttcgctgggagggagatcctctttaaccccaaggtgggcccggactgtttttttcttcggaggcagtgggcgtatttatatctcccccggtccccttatcttaggcctgttgcccctcttatcttctgcttatctgaacggctttcttatatttgaaggttatcttttggttatacttcagtcttcagttcgacatatctagttatggcaactaatctcccctccattgctgtggtggcttcatctcgcgccgttatctccggccgtttgacttctgccactgttgtgatctcactgacaaccggtaagatcaccgccgtcttcgattccgtgatcccagcatcggagttccctgtgaatactccctataccgactactcgcctcatgttttgctacccggcctggttgatgcgcacgttcacctgaacgagcctggccgcacggaatgggagggcttctacacaggcacccaggccgctgcctttggcggtgtgactactgtcattgatatgcctctcaatgccatccctcccaccaccaccgtgaacggcttgaaggagaagatccaggctgcccagggcaagtgctgggttgatgtcggtttctatggcggtatcatccccggcaatgcgggcgagctcaaggctcttgtccaggagggtgtccgcggcttcaagggtttcctgattgacagtggtgtaagtgaatgatatcagcatcgtgtgttctccaattagtattaacattcttcaataggttgatgagttccccgctgtcgggagagaggatattaagaaagtcatggccgagttggccgatgagccaacaactctcatgttccatgccgagatggtgcctcccattaccgcatctgtgggcgacgaggttcagacatccgatgcacctgccgaccctgccggcccccttgaggcgtatgcgactttcctggcctcaagaccttcttcattcgagacctgtgctatcgaaagtattctgtctttggctcatcttgctcccaatctccctctgcacatcgtccacctctctgcaatggaagctatccccttgttgcgggaagcccgcgccaatggtgtcaagatcacagccgagacctgcttccactatctgtccctggcagccgaggaagtacgcgacggcgacacccgccacaagtgttgcccgcctatccggtcaaagctgaatcaagatagtctgtgggaagagctggagaagcacactggtgacggcgtcatcaagaccgttgtctccgatcactccccttgcacaccagatctgaaaatgcttccagcccatgtccctggccactgtaccggcggcaaggaagaggagagtggtaacttcttctctgcctggggcggcatttcttccgtcgggctgggcctgcccattctctggacagacctcagccgccggaagggcctgacttcctcgccagaagacgagaacaccaagaacgcccttcaagacgtcgtccgtctctgctgtgccaacactgctgcccaggttggcttgcagtcgcacaagggcgacctggttgtcggctttgatgctgatatttgtgtttttgatgactctgccgaatggaccgtcgagccgagcaccatgctcttccgcaacaagtgctctccctaccagggccgtactctgcgcggcatggtccgcgagacctggctgcgtggtgagcgtatcttcagccgcgaccagggcttccatagccaatcgccacacggcaagcttcttcttgagaaacgagtttgagatattccctgctttcttactcttcttctttctttgtccacgcttatctcggcattgcgccttgctatctcttctatatctctgccactttacatctcgatctcaacctgtgagatcgaaccctctgatgaaccctctgatgagcactaatgatcgcacaacattcatacccgttagattaatgacctcgcattctagcttttagatagaatactaaaagcaatcaattgaatccttccaagtctcttaaatcaagctagcacagagaaatacagtaatacagtcattattgttgaatactatatagatacatatcaaagactcccaacatccttcttcccatccctccccttctcccacttctccctaaccctcctcctaacacccccattaacccccttcccccaaatttcctccttctccgtcccaacctcaacagcctcatccgcactatcctcctctccaaccggcccaataacaaccttcctctccttaaccgccctctctttaaccctcgcccgatccaccttttcaagatatgtccagtacaagaacgcctctgcaacggcaacactcagcgccgaaaacaacccgagaagaaccttaaccgcctcgctcgccactatctccggcgtcgggaacttcgtgagcgccgcgtacacgccgaacccggtcaccaccaccgagatgaagacactcgaaaccagtgagaccgtcagcgtatcttcttctactcggccgtcgctcgtgtagggcgatgcgtgtggatccgcgtggtcagcgtttggtcggtagtttgggtttaagagtcggttgtaggattcttgttcagttgctgcgatgaggcgtgcttttgatgcgaggtattcggcgctctgtattatgtaggatgttagaatctggtttggtgtggtttgtgtattggaggaaaggaagggattggatggggttgtgtatagaccacgtacaggctctggcttcttcggcggcggagggacgtagactttcgtgccgcggaggagggaactgaggacggttgggatgtgagaggcctgctctttgtattctgggtcgttttggaggtatctggcgagccggatcagttgttcgtgggctattgggccttgtgcttccagcgtggtaggcaagtctagctcctcgtggcgcgaagctggaatagcttcgaacgcggcgaggatgcgatctgtcgtaagaaggaggaccattatgatacaatccaatggaattagggcagttcaatagaattgaggtttagttcagttcatggggagataaagcggaaccccaaaaaagtggcagttaagctccccacatcgtcatatcttcctctctcctctctcacatacatttttgcgactatggcggactcaaagaagaggtaaatttatattcctattctatatatctacatccccttctatctgccaacctccaacctcaatcccatgcccgcatccacagaatccagaaaactaacccctccaacagcacggtaacaacacaaaccaacccgcgcgggatccccgtcgccccattcatcgacaatgtcagcgactacgtctcctcccgcgaggaagtcgagcccactctccgctccttccaggagatgatctccaagtaccagttcatggaggtgaacacgcagcgccgcggccagggcttgcgcgagaagatccccgatatcaaaaagacgctggagatggtgcggttcttgcagctgcgcaaggaggtaaatatgccccgcgcgcatcctctatttatcatacgcacttcgaagaaaaggcgatttgtggaacatccagctttgggaaattgaatcggaaattggaattcgggaatatcaagttcactaacactcacttttctagtccaacccaggctccgacctcgaaactagcttcgaactcaatgataccctctacgcccgggctgcgatctcacctgctgatgccgaggaggtctacctctggcttggtgcgaatgtcatgttggcctaccctctcgacgaggcggagaccatgctggatgacaagcttggttctgcggagttgagcttgcagaattgcgaggaggatctggaattcttgcgcgagcagattacggttagtttattcggtttgcgggcataggtgtgggaggttggtatattggcgcttttgctaacatttgactttttgcagacattggaggttgccacggcgcgtgtgtacaactgggatgttgtagaaaggcgtaagcagagggctgatggcaagggtggtgaagaggaaacgaaaaaataagaagcgccctggtggctgaatatgtcttgaagagatttatgggatattataaaaatgttgccaatgtcatcgattatgaagggtctattatcttccaggttgaatgtcaaggaaaagaatcaagagaatcataatgcagcatggagaaatattgaaaagaagtagtgaatattaagtatacgctctaaactaaatgccctatgcatataaaccgaaaaaagagacgcatgtcatgattcgtgaaaaccttgagaggtaatagaaaatcgccacaaaaaaaaaaaagaaagaaaaaacagaccatcgaagtgtcctccataacttcgttgagtttgaggacgccaccttcactatgaaccttccagtccacgcgcctgtacggcatattattgttggcgacaggggatccgaagatggtagagaatctcgacggtgcgctgctgtgtcccaaacaaaacgaaatgctaatcattcaactttgggaaacagaatcattggaacatgttggaacctagtctgtcggcatcagaagcagctcgctcacgcatccgcttcgagatgtcaaagccagtttcatcaccgacaaaggtccactcctcaatgtcatcaaggtcatcatcggctccatccggggaggtcttagctgtaggtgtaggagagaatggggtggacgaagcaagcgacttttgtcgggccaaggtcttcgcgtattcaagatcacgataaagggcctgaattgcagtagccacgccgtcttcctaaacaagggaatatcaaattagcactccatcaattaagcttgggtagacttagaacaactcacattccgaatctgaacacccagatttgttgccctcataatcatacgttcactgtgcgtcgcctcccacagagcccgcgagaagacactgacgttcagtttcttcaagcagatgccaacgcctagatcctccacccgggagccgaagaagaactggtctccgaagaatggcttgatgatggtggggacgccagctcgaagacttgccccagtggttcccgctccaccatggtgggctgcagcatcgatttgagagaaaagccagtcgtgaggtgcagattggatctggtggatttctggtggcagaggtatctcggtcttcgtgctagctgggtcgccaagcctatcggaccatcccttcgagaggatgcatcggacatctgctttctggactgattcgatgacggtccgtgtcagagcagaaggatccgagaccacaatggatccaaacccgatgtacacgagcttcttgccatccgctctggcctgtgcaatgaaattcgatagttcagtaggaggagtccaatctgtgccctcattcaaaaaccagtagccggtaatgcgaatccaatctgggtaatcaagaggagggaccaccacggagggcgagtagttatagaggaacggaactttgttctgctgcatcttgtctagggttgtggccttcaatcccaactcgttgtttcgccagcggttcacttgccccgcgatggccttccagaagatgttgtcgaacatgacgtatgtgatgtagttgtatgctccacccatgcgattctctggcactgcgaaagcatgagggtaggcccgtgttcttgtccatggcatggtgaatccgcggaagtacggaatccttaaagcctctgcaatgtgaattccggccatggcgctcggtgactcgattagaaggtcactgccctgacaaccaatccaagccgacgacaagaggtcatcgatccatcctctgaacttcattgaagcttccctaaggaaggaatatgtaaacatcccgttctccacgcaaattcgcattagctctgcaggatcaccgtcaacgggagcaaagtcaatcccgtgttttctgatccagggctcgaactcggcgtgggttgcaattttcggtttatggccctccgcaagcagtcctttgcagagcgcaatgtacggttgcacatcgccccgggagccgatggttaggcaggtaatccttagaggctcggaaggtttgaagttgataatggaagcgcgaggatcgtcgaagaacggatgtatttccgatgaatcctcggtgaaagtcggacgtgcatcatcttcctcggggctgtccagccttgcttcctgaagcatgcggtgctcagccttagctgcttcaacttcgtctcgttcttcttctgctagcaagccagattccaccaggaatttcacggactctagattctgatgcagtgtgactgcacagtcatctcgtgaatcggaggcattgaactcaaagaaaagctcttcatggccacggatgatgacaacaagtccatggtacccaaaacggaagcccttctctttttcaacgttctcaatgtctttgaagggtagaatcatcttggtccgagtgccaggaatcaggctccggaagcaaagtttcttctgacttatatagatcttgccgtatagcgggagcacacgatgcaaataggcgtaataggtcgcctgcagtttttcggtagatggaagagcgaagtgtgcgcgaaagcgatctccataattgaatgaaccttcgttgtcctcgggatcaacgttctgatcttcaagcaatggcccttcccgttctccataatgcttctggccaccaatccacatgccagagaccttttctatatagcccattgactctgttgctaagagtgtactcatttgtttcgagcggctcttcaagtattctgcaaaaccagcggcgcgttgaagggggtatgcgcccactttgacaagatcgtttaaatgagtaacggagctcggccctgaagattgcattgtattagattcgccagcgatatatcgcgtgtcttcggtggtttcattgcgacctagtgttctagatggagagcctgtcgctgcacctaggtccagccgtgtagacgcggagggggtcgtatcatcagaattccgttgaatattttctccgacacccaatgagcgtccttgcagtgtgcgcatagtgggtgattggaagacgtcgcttctgtgtagtatctgactggcagattcagtggtatctgtcatggattgtacaatcggcgatgattcggtcccttgctctgcaaatgaatctgtcgagccttgattttcgtgtcctacgctggagcttcgcttgcgcggtgaaacttcctgcctctgatcagacaaacgaacgctactgactgactgtctcttttgatttttgatatcgtgttggctctgcggctctttcattgcagaggtagccgacgcagcattgaccaggcgcttgatgtagttaaatgcgtcttggtccgaatcaaagaatgagaaaaagtactgtgaactgattagcaatgaacttagtaacgtttcatccaacgacctacctcgtcaattgcgtatgtttcgccgctgtcgagaactcgaatcttgaatgtctctgcgaaatcggccattgggctctcctccaggtcaataatattcgctattgggaatgatactttgacactgtcgccttcattatgcgtccggaagatgactttctggagggctttcacccattcctttgcactggtagcactgtctgctctgaataaatatgtccgctgatcagtggtgacctgaaagtccttcacatcaccgtctttgcgatctgcgagagacgcagagatcccatatcgaagatcgacatgtccgctagggaaatagagattggagggatctgcgtagtatgagaggacatcacccttcagcgcgaaccaatagcgatgatacgtagggttcttgcggccgcgtttggataggtatcccgactttatcgccacgttggacttctttgggaggtaggcgtaaaagcagatgtgaccttctgtcacatacatgtagccttgaagaagcatgctctggagcaacgagcatgcatactccaccagaaccttttcgggcttcgcaaactcaaacatcttcatcaatcgcgtagaaagagcggacgcggacgattccggttggtcttccatgggtttgtttagattgggtggcgagtgtggtgttgccgatgttaagtcaaagtgagattgcgcttcaaccatgcgacttagaaccggggctgctcgcggcgtcgcactgcgagttcgccttaaaggaggcaccttgagcatcgggtcgattgagtttgatgactcgcttgcctcgtcttctgaatctaacttgggtaatctctgcaaaagcttattgtctgaccttgttctttgatggcgacgtcctctttcttccagaaccagtgtgtttgattctggtctcttgcttggctggcgggagtccaaggatggcacaggcgtccgcgatgaagggtttccactagtttgctccatccacgggtgttcttccatatctccatcactatcacttgattcctcaaaccgggcatggaagtccgacttggacccgacagcagcaatcatggagaagagggactgttgcatataatgcacattgccgtcccgtgaacccataccttgcggcggagctgtgaaatcaaactgagcatcatccccatccttaaatttgtctggcactcgatctgaaaatggacggttggacgaagtaggtttcatacttgcgctcaactgccggtctgcccggcgtttggcatcgtctctaaacggtttcatccttatctctggtacaccgatacgatacaatcgatgcaaaatgtgggtcaaggatgggagtaaacgatgctagggcgcggtgaatcgctgagatcggtcgggcagtcagaagctcgagccaggtgacagctcggcgctgataggactatgacgatcaggtatacactagtcaaacggcaagacacatcagtctggacaacatgtgactttgtcatatcaaaaccgcggtcaggcgccaaaatcgtgatgagcagggttaatggtgaacaacgcacgggatggcagggtctaggccgataagcgctttgaagcttggacactatatctggatgatgctgtcaatccacactccaaatcagccaagcgccatgatatatattaaaaagatgatggaaatgaaaaaagaatggaaaggaagtccaaatctatcccaagagttcacagaaatctcagaatgcacaaagggagaaacatcacctgggctctctccgcatgcatgtgatctatgactccatcgccccttatgtcagctgagtgcctgaggcaaacagaatttatatgttgtaggcctttatgcctcttcagatatattgaataccaaattgaagttaaattgaagttgaagcctattactttgcgtggaagggaatcttaacttagagaggcgtttaaaaaaagagctcatcggactacactcattgcttcgacactatcaaatcaacaaaagacaatggaacacagagaaaataagattgtaaattgtacatagtattggggacgtcgttaaaccaaagctattctcaaaacacactaacgccaaatcatgccttttcggacttcttccgcttcttttcttccttgtccttgtgggacttcttcgacttcttccggctcagactatcatcctcatccttttcttgtgagtgcttctttgacttcttccgaggaagcgctgcagcttggggagcttcatcctcaacgtcatcgtgatcaagcttcctctttcgttcctctcccttgggaaccttgaacgaaggcgcctcaccctccgattccgagctagatccaagcgtctctggaagcgcactcgttgtaccgacaggccggaagcgcattttcatgtgcttcggctgcggccgggctggcttgacatattcgcgcaactctgccactacagcatcggtcttttttgatgtgcttgggagaccgatcatttcttggacgtggtaacttgggatgctttgggctgctgtggaatatgtttgtgtcttctcgtcgaaaagaagtagtgatttggttgcgggatcggcctcggaaagagcctcggctgggatgccgtagttcacaccgtcgtgggagatgatcggttcaccctgcatgatcttggccatgcacacctctttgattttggacaaaggtagagaggccggtgctgtgaggtgaaggacttgcttgccgtcgaggttggagagaagggaggagactttggaggatggcggggcctgcttctttgcagacttgaaacccgctggtggtttgtatagctgaggaccggagattacaaccctatgggcacaagtattagttaccataagagccgatagaggataatctctcacttcttgcctgagctggagtcgggcttcatctcgttggagtcgtcggagtcgctatccgaatccgaacctgagtccgaggtatcatcttcgcttgattcctgtacctttgtattcttcgtcatttctttctctttttcagtcatgaggtcaagcgaggccgatctgctcgagctgctatcgctgtcggatgatgccatggcgattgttcaattgtgtagggcaaactcgaggtcgacactcaaatgctttcgcaagaatgcgcggcgtttggtacacccgaaatccacaagacgaatgaaatgaaacgatgaagtaatgtacagggtatatacgcgaagtttcagcaaagccgatttcgcaaaatgaattggatcgacgttgagtgaggatgctcaggtccaacgatctttttttttctgctccgcgggagcacggaccaccagccaactttttttgcttatcggctttggatcgcattatcgaggtcgatttcttttcgaacacaagctcgaagcttgtctacccggactgtataatatcatggttaagcgaaaggccgaaaaacagcaaccagctggtaagccgtctatccatgccctacaactctaatttgaagctcacatgtcgtttctctaggccctgttagcgctgtcgctgctttggcagcgcgcagagctcgacaacaacaagaagcacagagcgcgaatgtaccagcggatgcaccgcaggctattgttgcgagcgaaccaccctcgaaaaagtcgcgacagtctctcgatggacctgaggcgactgggacaaaagaagagcatcgtacacggacaaaggcagcaaagaaacaagataaactattgcgcacagagacaataccggagcggccactaagagctacccggcctcaaaaattggaagtgaagcccgagttggaggatactcatgagcacctctcagacgagcagtctgaaaaggaccaagtcgagcatacagaaaagatggatgaggatgatattgcatctgttatgggtgatgccgatggctatgaatcacccgcagaaacacccgcagagcttcagaatttccctctatccaaggctcggttgaacgaaagcaacatagtctacagcgatgagagcacactttgcattcgcattaaggaacgcacggtatggatgaactttccggccatttggagtgaatactgatctttcccttagaacctggcgttggtgggccattatgatctctgggtcaaaagaggtgttgtcagtctgatgggcgcgaagttacatccgtcctcgcagttgcatagagtttatgctccctcgacccactctttgccagttatcaaatgtgttgctggaattgatggcgacgcagaagtagagatcaagtcttgtactagcggtatctcccgcctccgtgacctctcgcctctgtatcaaaggatatgggctggtgagaacaccgctgcagataaaatcaccctgaaaggagccgccaaagactcaaagcggactttttcagtggtatgcaatcatactctactccagctcgagctgtgttcaaagctaattgacttgacagttgtatacttcggcagatgattctttaaatagacatatccgaccccttcacctcgacaagaaatggagcgcgtcgatgaaaggtctctcacaacgtgaaggccaacttcgtgttctaatttgtggccccaaagcatccggaaagtccacctttagtcgctacttgttgaatcacgttttaagtccgacacccgagaccgagaatggatatactaataccgatggagttgctttcctggatctagacccaggtcagcctgagtttgcccctatgggtcaagtgtatctcgcgcggttgcgctctcccttcttcggtccgcctttcacccacccgtcattggacgattcccgtgacggtgaaatagtgcgggcgcatcatatcggcgcagcgtcgccaaaagaagaccccgatcactatgcactggccgtcatggatcttatggatcaataccgctcgttgctggagaaacatccccaatgccctctgattatcaactaccccggttggatctttgggcaaggattagaggttgcgacttggctggtcagatctctcggtctctctgatgtggtatatatgagtgaaaaaggcccatcagaagtcgtggatccgttaggtctagctgcccgtgaggcccgagtccccttgaccattctcccatctcagcccactgattttgtgagccgatcaagcgctcaattacgagcgatgcaaatccagtcatacttccatatgtctcatccaaatgatctcatcacttccctttggtcagatgtaccgctatctcgcacgaggcctattactgtggactatgccggtgcacgacaaggtattttgggcgtcatggtaatgggatcacagatcaatcccgatctactgcacgagacccttgagggtgctatcgtaggcgtcgttgcagtggaatcgccgaacgccatcatgagtgagatgtcagcatcaaatgacgaaggccatgacgatattgacatgggttcagcaaactcaggcgcgggtaattcggctgagctttccatccctgactgcattgtgcgaacatccgaagatcttccttatctctttgttggttccggtagttgcaccccattggatcccaaagcgtcaaactgtcttggtcttgctttggtccgttcgatcgatacctcttcgcgcaagcttgagatctccactcctattccctcatctcacctagaaaaggccatcgagcaaggtcatggcattgtgctagtccgtggccagcttgataacccgaattgggctattagtgaagagtactacgccgctcgtgcggcagagcggcgctaccagcaatcgacctctgggccgaggaaagctggagacattggcagtgaacaggcatacgagctggatccggccgagcatagtcgaacgcttgcactgctgcgagagagggttcgccgagcgagcaatgtgccttggatgactgtcgtggaagataatagtcgtcaccagcgtgaagttgctgcgcgacgagaaaagtcactatggaaattgaggaagaaggcatatcccggcagcgagagcgaggcggactactagctcccttctatcaaatatatacatagaatttaaatgtgacagcagtttgcacataaagttactgatttctatgtataggcctggaggtttcacaaggcatttccaccccaaattcctcattatttgattctatgacctgtgatttctctcgggtttggctactgattgaatccgtgatctgtatgtagcaacagatacgaatgaagagactaacttgaagcattgaaaataccacaaattgagcgaagacaggaggactaggtgtcaactggtagaattactatggcctgaatttttattactttccatgcaacgcacttttcttgacatacaattctagctagtcaaatcttttcatttagacctatagattgatatctggaaggatgtagtccatcctgagccaatggcaaccatacatcctcatgcgattccacaattcagtcttccttcctcgcttaacacagtaatactttccataataccgtagttttacttgccgagatcgatagatgtcgatacagatatactatattccgactttctccccggcactgtagatactatgagatctttagacttgtcctagttcaccccttatgcagccaccattctacaacggactagagctatggtaatgccaatgttcgaacagacacagagttttccaattattctactcaagcacagagatcctgtccacgcttaagggattgagatattgatgtccacgtcatttggttggtatagacagaatcatgctaggcttagggtttgaggaatggctagaatgcaaaggaggaagccatcagtgataatttccttttcaaaatatactaggctcaagtctggcgttaaggcctttcccccgataatagtacctttccctgataagatctttgatcgatagaatacggcgaaaaagaccaaatgataagtgatttctcacttaatcttctatactacatcgtggaagcgagattgatgtgtctaatgactttataaaaaaggcagttaactaagagattgtgtatgtgctgaatcatccggctgctggaagtatcctcctcccaatcgacaagatgtataaataagctaatatcgactttggttgtaaattgagaatggctttgaggtcccatatcacagcggtatttattctcgagccaacgtagttccatgctaattttgtaaaccaaactgcatacacactgtcttcacacttccctccgccccatagtcgctcaaatccatgtcaataggatcccctatatcatgaaacccgcacttccgatacatcgcgtgacctgcagatgatgcttccagccatgctggtatcttatggaaactggcttcctctagccctgctttaacaagtgcaatgccgacgcctttatcctgggcttgaggacggaccgcgagaacctcgaggactataggacatctgagtaaaggcttctatcgtaaaaatctgttcaactcacggctagcgcattttccagtaatccattttcttcgccttgctgctacagctctatagaagtctaggaaggctgccggattacccgcagtgtcgggggctgttttctgtctctcttcggtggctgccgcttctctttcatgggttttttggtcaaggtagacagtccacaatgaccaccccatgatttcaccagtctttctgtccgtcgcctttaaaaacagtgcagttgaactagtcgtgagtagcccccgaaggaatcctatcatgtcttctctctgatctggcgagccgtacatcaaatgcataagcttgtcattttcaaatgcctcatcatggatacgaacgagggtcggaatatcctcggcggtgactggttgtaatgagaaagaggatagcctagacattgtgcctcgaggcttccttgttgcggaggaatttaattaagtgtcaaaagaacggcaatagaacggggactttcgaaatgtatctgtatctgctgcgacggctttgaggtcttaattggaagctcgacatcaaaatgcctgtggggataactgtcgaatagaactccgtagagtccgccccgctatcatgtgatcgatccaactacgtttatagttggcgatagaggcataatattggttagcagactgtgcttcatcccgtgctgatccatcagactgtgcacgtctttgtaccagcaagatcccctcatccgaaaaggacatttgacatgacaagttaagcggtaccgttatttcattctatatcgagcggttcatataagatcaggttgtaaataacaaatgcaaggctcataacaagaaaaagactttccatgcataacgcttagtttgacaaaaggaggctggcaagccaagacaagatataagcaggcttacagctccctgtcccaggacgaggcatcactgtctgtctgatctccttgcttctgccacgactggaacatgagagttgccacgttccggcccatcaacgcactagtctccattgtcgagatgaagctctcgatgccacctgtgtaccacacacctggagctagaagagtctcctcaaaggtcactcgcggatacagaagagggtatgggttccatagcttctcatggaaccagctgatatcgcctatcgataggtctccaatggtcgtattgctccccgcaatctcactctccagccccagaatctgggcaatgaattcagccgtgggccgctctggcgagaagattttgtaaacataatgttgctgtttgtctttagaacccgcaacagaatgatctactcttcgaagtgtactaatactccagaattcagtgaggccaacaccatctgggttcgaacccagatcaacgcccttgggtagagtggtcagaatagtctcgggcgctcgagcatttgaatcgttcagaccaaaatacttaggtgagatgcggtgaggggatgcaaagagagtaacgtgcaaattgacatatggaatctcatctggagtgtgttccaagggaggggagacggagatacccgagtactgcaaaggaccggcaatgacaacttcgtcgaatagctcatgctcggagctggtagcggtgttgacctttgaagagacccgtacagtcccatcatcgttgcgtgaaatctcagtggcggtggtattcactttgatattcacctccgaggccctcagcgcgccatcgaaaatgcgccaatttccaccctcgatagaaaccgctccatccgtagccatacagacgacagattccaagccatgaatcagctgcaggttctgtccataattcactcgagtacttgcttggatgatctcattcgcaaacagcgagctgatttcatttgcccggagaaacacatcgccaggagatgcagtagcattgatcaagtcagccgcaatagctgcctcagtaagagagctgaaagggaataaaggctcttcataaaggcggagaaacctgccaacgacattctttaccagattctgagtacgcagaggcgccagtccataacgccagaagagccggccgatattccaccagctatacgaattcgtcaatgtgaaaacgaactgggttccatcccagatcccgatactctcagcagtctccctgggccgtgcatggtcagcactattgaccgtcaggccgaggtcacgggaagcgttgaccaggttgtaattgatctggacaaaaatggaagcacccagttcaatggggtacgccgggtcgtcgaatacattgactgttgttgagcggccgccaacatatgattcacgctcatagactgtgatttccacaggaatgttggcttcatctgccagcttgcgcagttgatatgcagcaaacgagcctccggctccggcgcctatgggagtatcagccccgtatggaactgtgttctttagagagaggcataccgattattgccacacgctttggggttgcactggcggcttctcgcagttgctcttgttctgctgcattgccaaacgagacgagtagggcagctaggatggagtacagtaagagagggatatgccgtggcatagacggccacattattatggtagcactagaaaatggcagagctaattggtagttgaacagtagatactgattagccagagatcaatgtatttcaagatatcatcagatgaaggatcaagggcggaggtgatgccatccatgagtctaatttggtagtcggcccatgtcacgctagtctcttctaggactagtgcgtttccatatcgcttatctttttgaggggcatcacagttttgattcacttaactccgaacaattcaaaatggattcctatgacagtgactccagtgtcgatgaggacttcaccgataccggtgtgcttctaggctatgctgctgaggatgtcatcgaggatgtaatcagccatcttggaggctggccggtaagttaccacgagtgatcactttgtataagcaatttcaactaaccgctactttggttcagaaatggctcgatgaagcatccccagcacctggcgatttcgccaattgcaaagtctgcaacagcccaatgctgctcctcctcgaattgcacggcgacctgcccgatcacttcccgactgatgaacgacgcctatacctattcggctgccccagaaagccctgcaaccgcaagccaggcagtatcagagcattccgcgcagcgcgtaaagtcgccgtcggtggacaaaacagacaggttgaaacgaaaacagaggaaacccagcccgtcgcaccagaacaacccaagcaggacctaggagcgagcctgttcggcgcaacaaacttgacgagcaacgtatcttcgaacccgaatcctttctcatccgcttcgggcccaacacccgcaggaagcaaccccttcgcgacaccagttcaggcgacagcacctacagccgagaagcccgccgtgtctgcaaccaacctggcctcatctttcgccgataaagtgcgcatctcctcgccaccgccctcagccgcgacaaagaaaacaccggaatcaagcacagcggctccgtggcccgcgcagtccgcgttccctccgccgtacaaaaatttctacctagacgcagaatacgaaactctctcccggccatcttcacccacagtgccagataatgtgcaaattgaaccaatggaggaagaaggtgctggtggcgcggagctcaaggacactttcgagtccgaactcgacaaggactttatgaagttctcgatgcgcatcgagcacaacccggagcaagttctgcggtatgagttccgcggtacgccactgctgtactcaactggtgacgaggtcggtacccggctgcatgttcacagtgctcctggtgccaagatcaccacactcggttcggggaggatcccggcctgtgagtactgtggaagccagcgtgtgttcgagttccagcttgtgccgcatgctattactatgcttgaggaggggcgtcctggtgttgggcttgggaaggatgatgcgggcatggagtggggcactatcatcatgggagtttgtggtcagaactgtacgccgcaggagttgggcgttactgggtggcgggaggaatgggctggtgtgcagtgggaggagttgagatagatgtggatgtggatgttttgcattagatgtgagggctttgcctaccctaggttgtacatagcaatgtgaccaggaaaacggagtattttggatgtattgccgagagatcgccttgttacttttttgtcacttttgatgcagagaatggctctcgtatatcgaatgtttgagtctgcccacggaataggagtgctgcgttggtgccatttatgcgacgatgattctctatgtgagttttgctctctttaagtggcctcgggagaagttctgtaaaagaagttctggagattatatcgatacagatgggcttcgcccatttgtcagtagcaacttagacatagttagggcacgggtacctcaaccggttagtttatatacataagaagtgtgttagaaccagttacggaacttccttggttttctagcaatctaggttgtatgtatatttaaggtagaggacatgataaataaacctagtactatcatcttttctcttaaagtctatatatccgagaaggattgattgagcgcttgaggattctttgactgggcgggtccctcctgttaattcagctgtattctgattcagctgggaataaggtcatatctgaatgttgtcatttgggctgataactatccttcgcaaatgacactatgtcgtgctgtatccccattgcttctctagaactggctctgtatgatttttgatattggcagcaaagccggccttatggagacacgactgaagttatgctaatggtataaacatcacatctatctctcttcctcatattacccagtgcaaatatttgcacggacaagtaaaaaaaaagaatccaatacagacaagagaaatagaaaaaaaaaaaaacaccggatgcgccaggccccgactcatctccgagcccctcctccatgcgaaatctctcatcggttcgtcacttgatcgggggtgggattcatgaactcatgtcatggatggaaatcaaacgatttccctcacacagctttttggagattttaaaaaaaggtgatgcgaaaaaaagaagatcaagaataaagagcttccgcagtaggcgcttatgcgggcaactcgaagccacggcggatgacacgaccgaactgctcgataccgacgtgctcgctcttgacctcggagcgggcctcgttctccttgttggtaggcacgcggatgacggcaccatcgaccttccagccgcagacgtcgacgacgaacttgtcgagcgcgtcacggctgcggacatcgagccaggactcgaggttctcggcggtgatggagcggaaggtgttgccgacctcaacggcgatgcggatgcggacgagttcctcgaagccggcaacgtcggcggtcaggtctgcgtacaggtcgtccgagttcagagtggaccagaactgggcgtactgggcggactcgaggagtgaggacaggcgggtgagcttctgcacggactcgacgaagtcggaggtctgcgaggcggagtgggcttcgttggtggtggggaagggctgggtgtttgttgggagcagagcaaggcagagcgagaaggcgggcgaggggaacacggtcagggccttgaccaggatgttggtcacagtgtcgggttggataaggtgggggttgaactggaaactggatttttttgaagagtgttgttgtcagtttggattcgcaaattttacgatgatttaggtaaccaatcaatgggttcttcacgttcagtatcttcaatttctcaacattcccaagtatattatgggatgtcaggtaataggaaacgtttttaaaagatactcatcatagtggagctttccaaatatgattttcgcaatgcaatgcctcgctaaaagaaaggggtctaactcacagcttcagcagggccaagttggcgtagcagtcgaatgaccggtcctcgcactgctgggacacatagtcctggaagacggtggtggtctcggggttgtaccgatcgaggccattgaggattgcctcaatatgggccggccgggtctcacacttgtcgaaggcgaccattttgatattgctggagggaggtgggaggtgatgcgggtcttttgtctctgctgttctttttggtgggattttccaaggtttgattgtggccgtggccggattaacctagaagggcactattacccggaattcttccggactataccacacatttgcaaacaataatactcgattctccgaaatagaaaagtggccaatggccttagattgactcgtgttcaaataatacatagaatacatatctcttgaatgcctcgtgcgatcgtgacatctcaatcataaattagccccagtcccaagaatggaaacccgctagagacgtgctcgaatcgaactccgtgaagatcgaacgaggtgcccaagagaagaaaggcatgtcccttcaagaaaaaaaccgaaaacgaggctggtaaaacaagaaactccgttccgtgtctgtaagacgccatagtctatgcccatgcccatatcgcaaaaaaagaaaaaacaaaaaacaaaaaagcaaggaaatgccgaatcgtatgcaggaagcaatgcagaaatcggtcgaaacaccttgccaaccggcataaaagcacaaaataaagcgcaaaaacaaagaataagagaagctcaaggttgaaggtgcctgaaacacaagaacaaagcaggcgggtatctcaataagaggttcatgcaaatgacgaaaatattatttcaagccatgacgggacgacgaggagcaatgggaatcgccttgggtcccgccgagatttcaagggtagacatgtcgatgtcgttggtgtcatacttctggccgttctgtggctgtatggccttagatacgaggactggctgagaagcactaggaatttcatcgtcgcccacggtgctgcagacaaagcgttcctcgttgagagggatgccgccaaacattaagcccagctgttgcagaagcgcgacgaaatgagcatgtaattcggtaaagatgtattcattgccgacgatttcggccaaattacgggcacgaatctgaccggccgcgcgccggcccgccggggccatacccccgcccgggggggagggggaannnnnnnnnnnnnnnnnnnnnnnnnnnnnnnnnnnnnnnnnnnnnnnnnnnnnnnnnnnnnnnnnnnnnnnnnnnnnnnnnnnnnnnnnnnnnnnnnnnnnnnnnnnnnnnnnnnnnnnnnnnnnnnnnnnnnnnnnnnnnnnnnnnncccccggccggtgaggaaggatgaaacgggagggtactggcgaccggcctgtcttgggttgttctgctcatcgcgggtcttctcgtcttcctggaagcgttcagcagcgcggacaatgctagtggcgatgcggccgaatgcacgccagatgatgggacatgcgcggaatgctcttccggcatctcgtcccgccaatgcgaccagtgcataactacgtcgcttgccgcgggccatggggtccggcagacggaaaatgtaggcaatggtgtaaccggcgactccgtcgccgaagcagatcgggccggacgaaagtccccggggcaggagctcacagctcagggtgcgaatagaggagcgtcggagaagagcatagtcggcggggttaggcggcccgcgctgggagagataggtatggatgtgagtgtggcatgaagaatcggaggcaaccgaggcagagtgaagtgattcgggaggagaagcatgagtgtgatagtcggtctcatcatccacctcggaatggttgttgccacatgagtaaacgagctcgcgcgagcgaagcaccggactagtagaattgcctttggcatcgcgacttccaggcgccccgggtggcagctgtttgctcacattttctggcagagacaagctgcaactcgcgcaggtgtcgccattcacaccacctcggctggatttttcatcgggtgaggtcggatgtcccttgagaaagtatgggtgatcttcaattctaggcgacttggactcggcagatttattcgatcgagtctcatcgaagcgcgattcatgtgaagccggggtaccctggggagagtgatcgggttcggggtgacattgcggacatgaaaaaggtaagacctgcgagcatatgatagaggttggaccatgcacctcgcagaagtgcgtcaaagaaagctgcccaagtcagtctaagctcacggatatactttttttatactcacaatgaaatccatggtggacctgatcaagcaacaaccagcatctttagtccattgtcccaaggcatgctgtgactggataatgacgaaaggccggtatgcgggtccacacagcgaccagttccaggggggggggagaaggttaaaaaaaggcaaactaaaaaagaggcgaagaaagagaagggggtttcgagttgagatattaaaaagaaagagaagtacggagtagtggagttgtgatgtgataaataagaagacaagcaataataatcgaaggggctaaggccctgggggggaacttcttcggtggaagcccgggagttgcgctttcgggaacttcccaaatggaaggtcgatggaagcaaagaacgtcgaatccacttggtttcggattttcgttcgtttcgtttctattctttcgtcttcgcttcttatatcttatatctcgctttatctcttcccttgaatggctgtacttcactctagttacaccacccttccggatgtcttccgatcacattctttcatgctcctctcctggattgctgcatgtgaaagtcattataaaatcgggccgaccattaatattcctgggtttccgtgctttgcctagcgccttgtcccgaggggctgttctcgtttgcccttggaccgttgcgtacaagtggagatagtggctgcaaacaggggctctattgtggaaatatgtgtggtaccaatgatcgtgcagagaatttgactgaatattacggagtacatctatgatcttcatcttgatacatatatcaatccatacaatctatatcaatgaattcaaaggtttgatatgatctatcagaggaatcgacaggggtaggggctcaccgcttcctctctcagcctcctgtatagatgtagcttctcttttttttttcccctctcacttctcatgttactcaaaaatcagcatgtgtcaaatcagtcgacagccgtctctattccagccatctgcccggtggatttctcggggagtaatctggagataactccgtgttaggggcacggcaaggaggtaaagggaagaattccctgtcctccgatttgctggtggacgtcatcgtattggatgtgtacaatatacataatttcatgggctacactccctgacctctggacactggacagacgatctttggatcccaaaaagatgctcatctttccccaagtgggacaccaaacagttccgtggaaaagtgggaatcggggccgattccatgttagcgtgttcagcagggacctaaaactttgtgttgggatttccaagcctccgggagtcgtagggtcatcgttgatatcccttttccccgttacattatcgtctgcgatattcaatatactcgaggcgaaggatctccaacataatccccctttcatccggatgagggtgttcttcggagttaaactccgtcaaatattgactttgtattccatccgtccaaatggcaaacggaggtttaatgtgcatctccgatcctatttcgtccaccgggtgagcatatcttttccaggctgtttccaaaagatgaaacagaccttgatactccgaaataggagccccggcattgggccggattcctaaatcctagatccttgccgacatacgaagccaggtgacctccgtacggactacggagtagtcgcacactaagtacggattactccgtacgctaggtggcactagtggtgtactccatacaatgtgtcaaatcctgtcgtctagttaccctttagtgatataccccggctcattccttcatcccggctactatgtcatctcaccctatcacgccgcgggcattattgatttcccatcgcttttaatttaggattgagggatttaagatactatttgtaacggaaaacgaaaggaaccgtaaacccactcgacaacccactgacgagcggatccccttattaatctcgccaccaaataagcacacgacacttgaccggcgtttggcaggcggagtacgcagtaccgaatatctattcccgcactgagggcggaatgggtttccctacgttatacagaacgtagtggtatacccacatgggcatggactcgactcacataaaacaccgactcatgtgttccacaatcaagatctactgagtacacgtgagacaaaaatggatatgttgtattactgtataccttatatactactccgtactccgtgtaatagggttatccacccacgaaccggatacccgattgttttgggaaggtggtttatgtatttcgtacgtaaacgccaatatggttttcatgcagaagtggatcggcaatgagacattcttatattggcccgaggtcaggcacaatcggcaagcccaaacacttggctcgatccaagacattgacgatctagccacgtgggatttttaaagtactagattgatgatcagcgtcatagatgcaatgcataggtaccacatacattcgagtatctacaacaccgaacaatatacggagtatgtatacgatcattggaatcggctgcacggccttgataatagcaggtcacacgatctggtcaccactcgactccacagaaccgttgctccatcgacaatttcgccctaatatatatgggtactacggagctctcgccagctgtcgccaccctgcgggtatgccagtctgcatacatagcttatcggtttgaataatatttatcatgcagctttagctagccccactagcgctagttggcaagtttattcaagctgctagggaccgtcccgttgaaccatatatcctagggagtggaacgtgtttagtctgtatgtggccaagttctatgtgaatttgcatatacacatacatagaaggcgcgagggtctagcagacatttaatttatttccgacttaattacatctttgaaaggatatgtaattgatccgtagttaacctagagaaaacatatcaaggcaccaaggcctcattagccgccctaggcggaattattgttaagcccgacctagatcacatagttgaatccacctgaaagatggaatcataatgtttttttttcttgtttttccatcaatagccagcatggcacttgaaggatgtcggttcggccgcgtcgccaaccctctcatcccctgcggcgggggtgtaaggcgatatcatagacctcggaaaccatattgactagcaaccacaataggaacaacccctgtctttggtcgacggatcgctttgtctaactaaacgagacacttcagtcgatcgcatggggtggcattaaatccattgcagattcagagtctgttcttcctttctcgggcatgtcgaatgatgactccgcatagctcgagcatgtactatcatcttcaaggtcgatcatatttgggcatgcgcatgttcatcattgacagcatattgcccgccggaccggaggctccagcttggccctgaagactctccagcaaattcttagcgaggttgatgttgatgttctcatcctcgtcatcctcattggagatcttggcagcctttcctttggatgtacttgcctcagaagacaattcttgcgggcgccggttgagatcgagcacacccgtaccttgcaattccgcctccattcgtcgggaaagctccttgatctgctccgtgtcgtcttccccgtccgagtcaagctcttccactcgtttgcggatggaatcgggtgcagagggcatgcccatcatttctttcatcattctagagaattcctcttcgttgaatgacgcatccttatcctcgccttcactgtcaacttcctcgtcatcatcatcatcgtcgacgtcggaatccgactcaaagtcatcaatgaaatcggcaccatcgaagcccgctgagttgtcattcaggaactcttcaaatcgagccacgatccgttgaagattttcctgggcaccagcgtcaccgaatttgccagcatctgctccctttccttcacctctccctttgagctctgactccaaatcctcatagttgatatccagccatttttcatcgtcttctcgcttatcccaggtttcttggatttcttgatcggtcggaagggtttcatcacctgtgtccacatcctcgagcaggaacttcatttccctgactgcaggcttatcttgattttgggggtcgtacagcagcatctcgaacccacacgcaagtttcatccccgcttccgcccgctcatatgctttgtgatcctcggttgggggcaatttgcccgcccaggtctttggcaccggaaattcctggcttttgagttgcgcatatccgacacgggtaaaccgaacactaacgtcgaccaagtcatccggcttgaaaacaaggtcggacgcatccttcgctcgtaatggtcgcatggcgatcggatcacgaacatagaacgcctccactgcaggcgagatatatgctggtttttgatgtaggagaaatgcgaccttgcgaggaattgtaatgatggcagagtggaggttttcgctgatttgctgagggtacttgcgcagacggtaaaaggcctcttcttgaattattgtcgagcgaagaaggcgaccgggttcattctggataatctttcgtgcctctgggagtgaaattttctccgtgacctgtctcttcgcctcctgcttaggcttgatgattcggagctctccttggttaatccacacctatagattggctggttagcatgatatcttgaataagccgacacgaatcaacaagccatagctcaccctattgtctgcgacatctggctctatccatgctgggagtgttcccgcagcctcaatcagaagaaattcgccatcgccatccgccactttgacccagatatctttgtgccgcttagtcagttcacggagtaagtacacaatgacccattcatcttcgatagagtcaccaaaggtggtgcgaccctgtagtgaggtgattcctaaatcccgcgacaattagctttagcgctattcagagagaggtcaagagttctgtaccatcttcttttgtaatttccaatcgaaaggcatcacgctgccaaatgtaatctttgagcaagtctttggttaaatcggctgctgtacgttgcacctccaacaatcgcgcccgggtctcggcagcttcatcgataacggcgggggtggggggcgggatatgataaattgagtattcgaccgcgtcgtcagggagctctggttttgggataggacggaaggttgattggaaccatgcgagatcctcctcagaagtcatggctgatcttatgctcttaaagaccagagatgacctcatgcattcttctgatagaaaaaagcaaaagcggcgaaattcacatcccgtgatccatacgctaatccccattaggttagaaatcaacagaggtgtccacgctaaacctaacgcagccggggataactcgcccaaaacacgtctgtgattgtcaggcgtgaacttcctgtctcaaattcgctcctgcccttattgacggtgatggttacgcgctgaaaggttctggcccacctctccctgttcaaatatggccttcccctacatcgacacaccgcgcaccgaatacgacggcaacgcgacttatcttacaactggatttcgcagcgcggggcgacataacctctctgcactcgattctctcgagaattcgttccaaacaccatccaaggacaatgatttgatcaagggtttcgacaaacgcgtcactccgcgcgccggtgcagcttctaagtcaacgagaagcgcgttacgacatcttccagcagcagcccccgggaagggagagtttactccgttaatgaagagcgcgacgaaaaacaaccttttgagaaacatgtctgcagcccgagcaacagacggtccgaaaacaccgggatatcagcgagagacccatcgcagcaacgctcacacacccggcttgcctgctatggacatgtctgatatatacgaggaggatcggacaatggaagaggcaactccggttccacatgcggcaagcagtagtccgcaaagtacaccattgccaggaggtaacgggggagtccttggtgacggagggaataatttgtcgctcaaggaccaagctatggtatgatacatatcccaaccattgggcttgcacgcaactttcttcgggctaatgctgatgttcataggccattgatcgactgagcaaagttaatttcagtctgaagctgaggattcacttcatggaagagcaactgcaaaaagctggaccggaatacaataacgacgccctcaaagagaacagagagctcaagctcttgcgagtaacgatgcaacgcgatatttctcgataccggaagagcctccagcaggcagagaaagatcttaaggactaccagctacagctagtggagttgaaggagaaatcatggagggagcaagcggatcagacggtacaacgcgaaatggatctgatgcgcgaagagcttgagtcgcgtgacctcgaactccgcgaagcgcgcgacgaattgaggcacattaaagatacccaatctcaagagaccgataaacttcgcgacgatattgaggatttagaagcaagcgtgagggagaaagatcggctactcgatcaacgcgaagaagagctcgaggatctgaaacgtaacgccgaggagaatggcgcagcttcagagctccagcttgagctgaaccgtgccaaggagcagatgcaagagctccatgatagtcttgcccaggccaagtccgagatcagagagtcagttgatgccgcaagggaggccgctgaagagaaggctcgtgccgaggaagatttgagagaattgcaggacgaaatgtcgaataagtctttcaccaccaaaggactgagccggcagatggaggacaggaccgaaaagctcgaacaagagatacacgagctgcaacgagagaatggttctctgagaacagaactggagagtaaaagcaaccatgcgactctcctcgaagagcgttatcatactattcagcacggcctagaagataacgccaaccagctggctgaagatcttgctgcaaccaggcgtgatcgcgatcaagtccggcaggaccttaaaactacttctgctcgactacaagaggccttggatgaactccagcgtggagtggacgaaaaggaacttcttcaaactcgtcataatgcgctgaccgacgaatcggggggactacaaatcgaactcgaccgtgcacaatccagaatccgcgaacttcagaaagcggttcaagatgccacatctcgggctcaggatgaagggcacaatattcgctggcagcacaaggcagaactcgaacggctgcaagaggagatcgaaaaccttcaccacgaaattgaggagaaggagggacaatttgcagtcgatcaaagtcgctgggaaagcaccaagcggactctgcaatcagagaaagcatgggcagaaggccaagcggcagacttgaagcgcactattgacacgcttcaggaagccggtagcacatactctgggaaggagtctaggctacaagaggccattgatagcgagaaaaagcgctacacgcaagaaaagtctatgctgaaccgccaaatccaagatctcaaagacgacctcgataagacaagacgtgaccttgatgaaaaacgagacgagcttcttacagcgaagcaggatgctcggctatctagacgcgaagagcaagcacttgcagagaaggtgcgagccctagaagacgaggtgatcgttttacaatcgactctggcggatgagcaagagcttgccaaggatcgacagaatgggacatctgatctagacaaaaacctggaaaagtctattgccgagaggcagaagctccgtgatcagcttgcaaatgctcatgtcgagatatttgacctaaaggcttcggcgcaggagattgaggctgaacgcatcgagctccaagctcaactcgaccgagtccagaacgcagatgacaccacccggtttgatcgcgacaaacttgaactacgcaagactgtgacaagacttgagaacgaacttaaagtactgcgagacaccaaatcgtcccttgaggaccagcttgtctcagaaagtgaacgatttgcagcagaggagggtcgtctttcggctgaaatcgatcgtcttcaggggaaattgcttgctaattcgggtaatcgagatcgagaactgacttcggccaagacgaaggcacagcgcctagagcgtcgcgcccaagaactggaagctcttcttgagcagcagcagcctgtgatggagaatgaacaatctggtacacatggggacctatctttacttcggcacagcctggaggaggctaggaaacgcgaaaagatcctcctccagcgtgaatccaagcaaaagtcttccgcgcaaagctataagtcacgagtagaagaattggagaaggatcttcatgatgcgatgatgaacaaattcgagtcacactccccacataattctccatcaaacaagcttcacgaagagctacgcagtctacgaaaacaagtcgctgaagcgcaccgatcccttcagaaggtgaacacgaagaaccgagagctagaacgtgccgcgatgaaagaagaggaccaaaaagacttccatgagctccttagatcctccactctcgaagccgaatcattagccctgaaactttccgaacgggaagcgcgcctgaacgaattgaaaacacatgtgcggcggattcgcgaagaacgagatacccacaaacgtgaggctgaagcagcaaacaaaaatctggatgtgttacaaagacgccacgacgaaatcctcgagaagaactccctttctaagaccaccaacaagaccaaacatgagaaagagatccgaggcctaggcaaggaaatcatctggcttcgtgctcgcctgcatcgtgaggagaaattccgccgtgatcttgcctggagcaagggcttgatggaactgggtgaacgcgtccgagttgcatggttcgtaatcccatctctgccgaatactatttgcaatatagctaacaagttatcaacagcaacgatgccgatctccgcatgatttcagagatgggcgtgcaagcccgtgaccgagctcctgtccgcactccacgccataaactaaaatccgccatatcccttgtgagggccgctgttcgcatgcaaaagatgagcagcgattggaaacgcaccaggaaactaggcgagggcttgaagcgtgccaagactgaaatgctcaagcgccgtgatagctcaaacaagagcttgcttggccagtagccctggagatcggttctatcttatgtcattcgttctgattttgtctcttgttcttccagcgtcgacattctgtcatgagagattcccccgacatgtcttgcaagtatactagtttttttctcgacttgttttgtgattctgtctaccttcttttttagagtgttttacagctggctttgtgccggtttgttcgaatcatttgtgtatagtcatcccgacaaggaatttgatgattcaaaaaccgttcgttactcatttatgtagcgtctgccagtacagaaattgagccttgatgacacctacaaacatgggcgaaagaatcatacaggttgtagtcttgaaagcagtatgtatgctactcgcacgctttcctatgacggagacacttgcggggatagacacttgaaatatttgctcagccaacgcctcgccgttgccaaaagtaattgagaaacgcttctaaacaccgaaatcttcggagacaccgaccaaaaacacaggaatccgagatgaagcaagcgttgacatgggcacagataaagcatatgagaaaataaagagactatgggcaagggcatgggatattcagatttcgtcctctctggacaagccaaggagccatggttttatgctgtcgatgaggtagaaaaattcacatttcggaggccatgatgggaaggatatcgattctttcggaagatacgatcaggcgccttcactaccgaattcttgggtccattcagcgttcctcgtgagatcctctccgctaacggttggccgggagttcttgactgccttgacgaaatccttcagagcgagaggtggctccaaaagcttatctgcatcgatatcgagccagctcatttccactgcgccctcatcccctggtgagcaaggcgtgactttctctacaccctcatcgagtacctatgatggagtcgggtcagtcgctgtggtctgggacggtgagaactgagtatacataccttcttataatgtgttgctccttgaatcttgcggattggctgcattagtgcatcctgcacgcaaatactaatatcgctaccggagtagccttcgctcagatcggccaattggcgatagtcggtctgggtcatttgacacggcgtcgagcccacggctagcatgaacatcttcattcgtgcattgaagtcgggaagactgatgtgtattcttcgctggaatcgtcgccgaatagcagcatccagttgccaagggatattggttgcgcccaaaatcaaaacgcccttcgagtctttgccgacaccgtccatctgtacaagcaattcggtcttgatacgccgtgaggcctcggactctccttcgccacggggtccgcacagcgcatcgacctcgtcgatgaagataatcgcgggcttattctcacgggccatgttaaacaactgtttcacaagtctagacgcgaattagtatgcaactctcgaaactcccgtagataaagatatcgcatacctttcactctcacccatccacttcgagaccaggtcactactgctgacactgaagaatgtgctgtttgcctcagttgccacggctttggcaagataagattttcccgtgcctggaggaccgtagagcaagatacccttccagggttggcgcttgccagtgaacaaatgagggaacttgatgggtagaatgactgcttccttcaatgcttcctttgcgttctccaggccagcaacatcttcccacttgacgttcggcttctccgacagaatagctccttgaagcgccgatcgaagctttttcgcatccgcatcttcgccgttgtcgtcatcttccttcctgtccgattcagtgttgttagcgggaatacataggacaaaagctcacttgctaacactgtttatcacacatatggcggtgctaaaacataaacttttgtccaaagaagttgatacataccctcccttcccactgccttgcgccacctttccatttgcgccaaccgcactcggttttttccggtcctcagcgaggtggttcttaagcttctccgcgcgatccatatattcgccggcctttgagcggatcatttccttcgatttcgggttcttctcccatttcagggccagcatgaacaactccaatgcggagtagtacatctgataagccttttcgtactcgccatcgttgtcattctcgatcgccttcttgaccgtatcaatcgcccgtcccaggaaatctgtattactcatgacgggcaatgcgggtgctgtctgtagaggtagcaagccgaccgcggaggcagatgtgataaagcggggagaggggaacaagggttagggcaatgggccaaggctggaaggataggcagcgagtgccagaagaaagacttggagcttcttgggtgtagaagaaaagaagaagtgcaaaacagtcctagaatcgagagttgatgagaattggaggggaaaagtgagaggtggaagttgttgacgggcgggatccattgattttccctcctcccacttcacctccaagttcaccatggacgcccagaaacagcttcaagcactttcggaagagttccagggaccgcagaacggtatgtctctatatttatttgatgatagcaatagctgctgaccttttccaccacccagagcttgaggttctggtcgatgctcgccagaagctcgaatcgcagcagcaagagaacgaaggcgtgcaggctgagttcgtccagctggacgatgaatccaacatttacaagctcatcggcccggtattgctgaagcaggagaagaccgaagccaccatggccgtcaacagtcggttggagttcattgagaaggagatgttagtgccacttccttgaccactgtgagccaacgagaaatgcgtgctgactgagatgttacagcaagcgaatcgaaggcgagattgatgcgacacaagacaagagcgagaagatgcgctcagaggtaaatcgccctcatccaactgcaatccacaccccactatatgcatattctaacccctcacccagctcatccaactccaaagccaggttcaacaacaggctgctgctgcttcagcctccgcataaggccaaagaactcctagagcctgcaggtgaaaaaggatatatcacccggagatgcaataatatgtggcgtgcgagctacgactaggatggggaccaaccctcaaccgtttcactgtgattcagtacatgcgatatgcaagtcgtgagccccatttgggggtagcccaaggaatgtttgggcgttaaggaccaaatcccaattgagatggggtagcttggaaatgtatgatttgtgcagttgcctgacaccaaaacagcgcatggatcggttcaaaaaagatatacccttgaaaatttaatgcaatgctgtcaaaagtgatcgattgatctttgaatgaatcaaaaaaaatatatatttgcacgatcttttcttaatgccttctagtgagaagatttgaaatagtattcaatttatatcgaggacgcatgtgattgcactcaagaaggccatctgaagcacgcaaagaagctagaggatggatgacttctgatgccatgtgtatattgacaaaattctattcgttgattcataatcaaacatttacatatgggaaacttgatctaggacttgaccagcagactggtaccggtcatctccttgggttgctcgacgcccatggctgcgagaacggtaggtgcaacatcacccaagacaccgtccttcttaaggctccaactctcaggggcgttggccataacaaagggaaccttattaagggtgtgggaggtcttgggggtacccttctcggtgagcatctcctcggcgtttctgtgaatgtgggttaactagcaatcctctttgataggaggttatcgtatttcccagaataacttacccatgatcggcggtgatgaatagaacgtagttgttcttcttgcaggcctcatagatctcaccaatcgccttgtcggtggcagcaacaccctggatggcggcctcgtacacgccagtgtggccaaccatgtcaggaggggcgaagttgttcatgacaaagtcgaacttgttctcgccgaggcgttcagccatcttatcaccgacagcagctgcactcatctttggatcaagatcgtaggtagcaactcggggcgaagggatcatatcgcgcacttctccggggaagaccttctcgataccaccgttgaagaagaaagtgacgtgagcatacttctcagtctccgcaatatggcactgctggaggttcttcttgccgagccattcggccagcacgttacccatatgttgcggggggaaagcaacattgaagttgtagtcagttttgtactgggtcatggtggtaagggagatgttcttggggtaggggaagtccggaaggggggaacggtcatagtcgcccagcagctgagtgatttcacggacacgatccgagcggtagttgaagaagaagagggtatcatcatctatacaggctcaattagttgtcatggcatttcctttcagtttggaccaaacgcaccctggacacggcgctccttgccgccaacaatgatgggcttcaggaactcatcgttctcattcttctcgtagcgctccttgatggtctgtagcgggtccgagctgtcctcgccctcgccagtgaccagacccttgaggccaatctcaacacgctcccagcgcttgtcgcggtccatgatatagtagcggcccacgatagtcgcaatcacaccgacaccgatctcctgggtcttgtcaagcacttgctgcaagaacttgtcggcgctcttagggtcggtatcacgtccatcggcgaagaagtggatgaagacctcgggaatctgcatgtccttggcgacctggagcaaggcgaataggtgagcgatgctggagtgaacaccaccatctgagaccaagcccagaaggtgcagacgtccattgccctcctttgcgcgagtgaaagccttgacaatgctgggcaccttgcccatctcgcccttcttgagggtctggtcaatgcgaacactgtcctgccagacaacacggccagcaccaatgttcaggtgaccgacctcactgttgcccatcagaccctcgggcagaccaactgccagcgaggaggcttctaactcggcatagccttgggcagtcttggagttgggctcagcgaagccggacatgtgtggggtatcggccgcggcgattgcatctccctggggtggggagtcggggcctgcaataccccagccatcaattacaactttgagacgtacattagcggtatatctttttgaggacctgggtggcagtcgaccatactcaaagcaactttttggtcggccatagtggggtttattatggtggctgaatcacacctagaattatacgacactggtcaattgctgggccaagagaaaatttgaacgattcacttacttttagacggatgtttggagaagaagaatttgaacgactaacgcagataaaaggctgccggtgaggggcatgagccccgacgtcaccgtcaccgggtgccaggagcgtatttgctgatctaatcatatgttgcggccgtaggagcgggtgtgtcctccgactcttccctaaaaacttaccccagccgggatctactcgtccttcagatatatatcctcggaatcattcgagtcaacatttccgacaatggcttctcgatccccgccagtgggtattccgctgctaaaatcccctgtgcccgagacgcccttcaaagacgcgccaacaccagtaccacaaacagtaccttttccttcaccacagaccttcgaggtaatcccaccattgcatgggattctttctcgcttgctctcctccaaaggtcagcaaagcggtccatcagacgcacctggggatacaacaggtgtcccaggagcttcccaggcacagacccaacaagcaccttcgaacatccccaatggcgggcacaacggcaacaatacatcatcacatgccgtaccagaagtatcggtcctcggttcaagcgctcatccgccgctcgatgtgaaaaacctccctaccgaaactagctctgtcaggattcgaatccagaaggctcgtacagtcgtcgaagggctaccagatgtgcatcggtctgtcaatgaccaacaaagagaaattgcagaactagaggatcgtgtgagacgtttgcgctctatcatctctgacttcgggtatcgagcagggataccacatgaggacaccacaaggaccttggaagcataaagctcgaaaccagaggatctcgggctacaatcggaactcccaagttacccaggtgctgcaggattttgagattgatttattcggcgtttataaggaaataccctggtgtttttagcgatcatttcaagatagcaaaggctccatcatttcatgagctgtggcaaatctagcaattcatactcctagtttctcttctttctttttttcaaggaattcattcttgtttgaacctccagccaatctagttcgatttgccgcaccaatttacaaattttatagccaaaaccctaatccggccaactgtctccgatatcgttcggtgggttaaagttcagggcctgaggcaacggaagatccctcccccaccacttgcatttattttttccccttctcttcacctaccatcctccatatcaattttttctgtttacctcataagacagattaccatacttcatcatgtcttacgctctttccgagtcccaccgggacgtgagtatcacaactgccctcattttcagcatctagatcgttgactcatcgattatagcaaatgcacaactccctcgtggccagtgatccggagattgctgccctcatggtacgtcgaaactatataccattgagacctgcagtgaaatgcattgtctccaccagaaaattcggctgtgctaattcttctactcgtacaggaaaaggaaatccagcgtcagcgtgagtcaatcgtcctgattgcctccgagaacttcacttctcgtgctgtcttcgatgccctcggttcgcccatgtgcaacaagtactccgagggttaccccggtgctcgttactacggtggcaaccagcatatcgacgccattgagatcacctgccagcagcgtgctctcaaggcattcaacctcgaccccgccaagtggggcgtcaacgtccagtgcctttctggtagccccgccaacctccaggtctaccaggctctcatgcgtccccatgaccgtttgatgggcttggatctcccccacggcggtcacttgagccacggctaccagaccccctccagaaagatctctgccgtttccacctactttgagaccttcccttaccgtgtcgaccttgagaccggtatcattgactatgacactcttgagcgtaacgccgagatgtaccgccccaagtgtctggttgctggtacctccgcctactgccgtctgattgactacaagcgcatgcgcgagattgccgataaggttggcgcctacctcatcgtcgatatggctcacatctccggcctgatcgccgctggtgtcattccctctcccttcgagtacgccgatgtggtgaccaccaccactcacaagtctctccgtggcccccgtggcgccatgatcttcttccgcaagggtgtccgcagcaccgataagaacggcaaggatatcctttacgacctcgagaaccctatcaacttctccgtcttccctggtcaccaaggtggtccccacaaccacaccatcactgctctggccgttgctctcaagcaggctgacacccctgagttcaagcagtaccagcagcaggttatcaagaatgccaaggctctcgaagaggagttcaaggttcttggtcacaagctcgtctcggacggcactgacagccacatggttctcgttgacctccgcgccaacaaccttgatggagctcgtgttgaggccgttcttgagcagatcaacattgcctgtaacaagaactccatccctggtgacaagtcagccctcactccttgcggtattcgcattggtgctcccgccatgacttcccgtggtatgggtgaggaggacttcaagcgcattgctcgctacattgatcagtctatcaccctctgcaagaagatccagagtgagctccccaaggatgccaacaagctcaaggacttcaaggccaaggttgccgatgagagcgttcctgagatccttgctcttcgcaaggatatctctcagtgggccagcaccttccctctccccgtttaaatgggatattgaggacggagtatgagttacggaaaaaataaagagggatctgaatcaggatcccacgagttcaacatcatttcgtataacaaaagaaaaatacacgggtgcgtttttaggggttaattaccggtctgctttttcaacctgacgcgggtcattgggatatgggaatgcttttttgcatgtgaaacgagcaattgttttttttttcggcggatgggcctcgcacttattcaacagcgggctcacatgaatttctgagggggaaaaagttcaacattaattgggcgtcctatgtacattctacaatctgttctcaacacaaggatctctagaatccaaggattattttcttctctgctttatctttccaaggttcctgatacggtcctattatctatacatgtaagaataagtcgtgtaaaccttttctggttagttttgcccgacttcgagccctatacttggcgcgcgatatggccgttgaaagcacataaacattgtagcggcgcagtgccgttattggcttgtcctggttcaaatcttagataaaaagtctttcgaaaagtccaccacaaagacattactcggccgcattagcggccgaatattcttgttcctcatatttagatggagaaagagcgaaccgctacggatgtatggatctagtaaatattcatgcctcaacggaaacatctccgtgcgaattcattgttcaagatccctactccaactatcctctgaatttttgactgcatcatgctctcagttctcccaggcgcgtgaaaagctcaccatccgctcagccgcatctggctggctgagaatttcgcccctcgggtcttctccaagatcctcctcccatactgtctgcggctcggaattggccttcaggttattgtacaggcacatccgcaggtgccaacgaagcaggtcggcgctcatacgccaggttccactccgagcagagtctctgagacgagtaccaccaattcctgtaggaaccggtccgaatacgatgatcttgtagttagcctatgttcacaaccattagtatataccgacaaaatatcgtatatggaaagtctcacatctgggtcaatccctagttcgatactatcaaatagggagtggatatctgcgctgaggaggagtccattctgagcagagtatatacgtgacttcccgatctcggtctcggggagagggtccgtgatatactgctggtatccatctcgtctctactcttccatactgctcacggggaatatatgtgtagcatcaaggtcgcggaaagggtctttaaaactgcttgccctattctgcccagtgattgcacagcaaccgtctctttgacggaggctattacggaatttcgtttgctatagaaatgattagcactggctgtttatgtttttagtcatttctacgtctactttaccagacgactccattcactccggccctgggattgggaatcggggtcttgagttccggtatcttgagttccggtatcttgagttctgactcggcggggcgcatagttggttgtcagctcgattaattggtgccctagctatacgattctcagccttggaaaacctagttatgagacgtatcaaacacacttagatccaaacccatgtagttaccaggcgccaccgaaatcccactgttaagctggagtgcagtggtaccttgtgtgttattggctcctaacttataaaattcccgctcgcttgggttatgaaagacgaatgtgaatgaacagtatcgatagagcatctccggagagatatgtcgatcttgttgggcagttgggattgccagggctataacaaggctgtattagtcgcactggttcctatgaggctatcgtgacttacaggcaagaagagcgccgttgctattataaacctggaggtttaactgcgggtacctttgtgattgaagaacaagagctggcatagctgttgccatattggagctgatgaatagagaaacatagaagcggttatactccccaattaggttagcttggctctgatgtcatccgtaaattcctcaggtgtcgatgtatagaatataagtcagccagacactccatctagttatagagagaagtacctgtcagcttgtgttcccgtcttttttggcaactgacctcgatatcgggtttatatcaggatcagaaaccgtgggcttaccattggaaggggttgggggttgcctcttccgagtgtttgtctcggtataagctaaggatggaatagttagaataaatgaaatgtaagtgagaaggaagtgggagataccaatgaactgtaccggggttgcactggcagtacaatgtaaacaagacgcggttgcatagtagaatagtagaaagtcaaaatttacaccacacaccagccacggcaggtatgaaaccaaaatgccagtttatagatgataattagaacgatgacttccaaagaaagcaagaaataagagcaaatagcaagtgagaaaacgcaagtattttgatggagtgcgcaagtggtctgtaccggataccgtaccgcaggctgcagacccaacagccaatgagaagcgcgtatttgtatataaacctcacttttatcacatcaactatgcttcaacaacttcaaaaattgctttataataatcaagggattagaatatataggtgtgagatacaagatgtagggttttttgactactcgtatgtaaagtagaagtcaggcagaattaaattgataccttctatgtaaggcagaagcaggcagaatcaggcagaagggggggcggtacatttagacgtccacgtgagctccggataactcaaccttggaaggttcctcgttttctctctctctattcctctctctctcggtctcccgacattttgtttttttgctcttttcttttcatctcttgccctttaactctcgttactgcactgctttacaatccccacggccttcctgaatttggcccctcattagagttccaggctccatcgataaggacgcaatatcttatcgctccggtccctcacggagggcatatacttagatcaatctgcgtttgattaaaaaccggaaacagtgcagtacatcttgaagaagtcaccggcgaaccaagagagaacaggaccttgcccgacatggcgaataccgcccaatgctactattgctttgagtctctcctcgcttcattcgaggatcgcgagcccaccaccttggcagccgtagaggctctatgggaacagcacgaacaaactaagaagttttcgagtcttgaagagcaaattgaagaggaagatacaggccgtcagcaatccgtaaatgaactagacgaagatgacgatagccaccaatcgtcccagtcaagtagtcaacccacgaagatgaaactccgcagcatcagtcgtcttcagagccaattctctacctcttccagcatagccacgtcttcgtcggccgcatccaatacatcttccatctcactacagtcgagctcaaccaatatcaccacgccaagtgtggtttccgagaccccccagctgagatcgcctgatcagcgatatcccctgttcgtgacatggaacaccctatcacgaagcggacacaagtctctacgcgggtgcataggcacatttgaggcacaggaacttgcagcggggttgaagtcctacgctttgacctcgtacgtgtgttccgattgaatacccctctctcactacaacgctacaagcaacggtacacccctatctatagatcggactgactcacgtgcgattttgttttagggccttcgatgatacgcgttttgaacccattcctaaatctctcctcccctcactgtcgtgctctcttaccctccttgggtccttcgagccgtgtacagatgccatggactggtctctaggcactcatgggctgcggatctccttcatccaccgcggccgtcgctatggtgccacgtatctccctgacgtcgctgtcgagcagggctggaccaaagaagaaaccgtggagagcttgatgcgcaaggcaggctgggatggtggtagcagcagtactgcacggagactgctacgcggtgcaactgatgggaactccagcgccacacagccttgggaccaggtctcggatttccgtactgtgagataccagggcctcaaggcaagcgctagttattcagaatggcaggaatggcgagagtgggttctcgccctagatgacggggaggaaatcctggaaggcgcggattagaccgctttgcttcttgtcccacatctcaatgctccaattggaactgatgattataatgaccaagatgatacgcttctttcgtgggttttcgatgaacaacttttcggtctgggtgttaataaggaatgacaatggtccgagaattcacggttgtgatgagaatttgatatgatatctcagctctataaagatagacaagtgttttaaaccgagaattatccgagaattattgattataaacactggcatcattcattgtattgataataatgtgataatgcagacattgcaaaggaacccaagcgaaggaaaagcctcagaccatagaagagcagccagtgattgtcctaaatccgaatccgaacatccctacagcagaaacacggcattgacaaaagccgatacatatccatacattctaccgaggggtacggctccacaaaccagcaaccatctccttgactcttcgctcctgggcccggatctgctcctcagtctgcccgcgcgcattaccacggctatcaatctgcatctgagccccgccagcattggccggtgcaggcggaggggcatggtgctcctcctcggtgatatcatccccattgacacgctcaggcttgggatcaacgctcaaaacgccgtccatcatgaagccaccgccctcgcggagcttattgatggcacgcacggtgtcgatagcacggtgcagcgtgcggcgcgcgttgaagttcttcttgaccgttggcagcaggtcttcgcccgagccgaccttgccgctgtcggatgcctggttgacccaagggtgctggagagcttcatgggctgtcatccgtgactgcgggttgactgtcaggcagctgttgataaagttgcgcgcttcctgcgatacaccacgccagtactcaaccggcgtgaaggagtagtctgctgctaagattgcttgcatctcttcgagattggaatcccggtcgaagggtgtgtatccacaaagcaagaagtaggtgatcacgccgatggcccagatatcgctggaagaggatggctgttagtaaaagataaagagaccgtaatgtgatgacttacactggcttgccatgaccgctctttttgaagatttctggtgccatgtatcctggcgttccgcaggttgtagtcaggacatggaactgctcctcgtccatgatcctcgacaatccgaaatcggcaatcaaaagatcggcgttgtcttctggcgtgcggaaaagtaggttttccggctttagatcacggtgcacgatcccgtggtcatgcagataggccacggcagagagcactgcgcggacgaggtctgcagcgtcagactcatagtagctgcctttgcgacagatgcggtcaaatagttccccgcccagcgcgagatcagtgacaagatatactagagagcactcgttagtgagggtgtagctggagctatcatggaaacacacaattgttcatcgtctcgaagtagtcgaccagtgtgaggatgttctggtggcccagtgacaccttcttcaataccgcgatctcattccggacctgtatatttcggaagacgtcagtccatactcttgtcttcgtagtcgtagttctaccggcatacacaccatatgctcccgcccggacatgagacgcttgttgatgaccttcgccgcataatagcgaccggtatcgatgtgcacacattccttcacaacagagtacgaaccagcgcccagtgtcttcccggtcttgtatcggcacggttggaccttcggcttctggccgctcgggggttgtgccgccattgcgaataaaaccaagtgcgggatgcgcgacgcgaattgtggggggatggggaagttgtgcgatgcaaagcgtgagtgaaggattgagcgcagtggtaaaggagttcgactcggtgatgcgctatatatgcctatccttatgtacctgcgcaatccaaagtcagccttgccgtaaagtggcgcaggagtccagtgcgaagacctaaggtgagagtgcgcaaaagatactcacagttgggcgacaaagcctgattacagctatatgggcttatggtttcctcggcggtctttgatgttttccgaggggctgcgggggtttgaagtcgaagatggggaatcccgttggcggggcggctgctgaaacgtcagatgaaactatcaaacaactcaactccaacagcgttggcagttggaatagaaaaatgaatgaatagaaagttgaattaaaggccgagataaatatcaacggcgcgattataggacagggcatttctgcccagttggctagttacatttgccccaacaccagcccaatgcaaaacaaagaaaactcatagaaaatggtacattcaaaatcgttccagcacatcctcgacaatgtgctccaatagttgtagcttgtggaatttggctacgctctccaacacttgtagtttcttctcgatctccttccgatcaattgtcgcagtccatgtaccactgcaagaacagtgctccatgaaatcactgatcttaggattattgcacttcgagcacttgatatcctgcgtctgccattcaacaacaaaaccatggacttggccaatgagaaattcttcagttgccagtcggtcgtactcggcatgacagaaagggcatcgccagggctgggcagatttgctggcttctgagctggcatcaggcaaaacatcttcgtcgcgacagaggtcgagatcccgaataaggcagcacgagttgcaggacatttccggcagcttcaagctaccactagggttctcgaatcggccctccttgctgaattctcggacctcgaaaagggcaagaagctcgcgccgcagcaaccgggattccagggttgttgtcttggacaaactcagaacctgcatcagcagtttggtcaactccaaggatgggttgcgtttgtccttgcggccgactagaactcctggtaaaacggggaaggcatagtcggatgcaagctcagggtggagcatctcatcgcgttgtctgcggatcaaccccgagatttgcttcttcaatggctttgagaatcgatcagagagaattgcagtgatctcctcatcgtctgcttcgttggcccgtccgatgggaatctgtgttggccgaggagttggcagatccccgtcttcgagttccggccgtttcaggccgtgcatcagctcgatgtactcgacaatccagtcatggaagatagtctgcatgggcattggcaggaaccggctaagctgccagtgcatcgctgtctcgaggtcctgttcgtcggcctcagtgacctctcgacagcccttgcctccgtagttgtattcatcataccaaacgaggtagtcccagtactccttgatctctagatcgataaagtggaatgaagggttagcgcggattgacttgaggacatactggctgtaggcgtaggcgttgccgacctcggtcttggtcgtttggagaaggaggcgtgtagggctggcaaagatgacgtgggagccaacacgtctgaactctgccatcaatctctggaatgacctccgtgacagtaatcgcacgtagttgtgtagagacctgtcatagagacaggacacagggctttccacccatcgaatcagatgctggaccataatatcggccatgctgttgcctgcacaggcctctgtccaccaatgtttgaccatctctcgaagaacgacaacgccggcagaggcaaatgctttctctgaatagaaaacaccagtatcttcaccgtctccagaaggagcaagtagcgtatcactgccgtccatttcgttgatgatagaagatgtcagaatcgtattgatcgacaaattgcgaacctcgagttcaatgcacactgtggagtaagcacctggtacattgacagatggcatattgaccttgtccaaggcacctaggatgtcatccctttcatagcccgcgtgatcaggacgcgggcctgatgaccaccagagcaccacatttttttgttgcagccgtctagcgtacgagatatcgatgagataccgaggatcctcactttccaggttgcaaagcggaacatcaccgaaccgagcgagcatggtcaagtgctggatccaagaagacaagtataaatagcgcgtgactagacgtcttgcaacgaatgcctgccagccaagtgggggaagttccatatccgaagcttcgggcttcacggacaataatggatactccttcaggatcggaatatcgtgacacaggcggtctttttgttgggattgaatgacaagaacggcaggctgactctcatcatttcgaatctttctgatcagatcaccgacctcaaggtgagccttcctgcgcgtcatcacttgcgtagttttgaaatgaatattatcctggtagtcgaacgcatgctgcgattcatcacctgatgcagcctgtatcttacgtgtgagaagctcggtgtagattttatcgacgttgggaagaccctggacatccctcgtgcggttgagaacgataatgtgcgcctcatttttggcagtcgagaatatcgcgaagacttgtctatccccagagacaatgtgatacaggtagtggaacactaatgacgagtccatcagatagggctgctcggaagatgtgtgaagtaatgtcgaaaggtcgaaacccttgtccaagccgtcacctaggacaccgcgttgctcttcatcgaaggtacaatggcttcctaacttgagcactgctcgagtgcttagcgggatgtttccctcgtaaacaccctcaacgctagggtgctggaagagaatatccatcttgtcggcttctgctagataattctcttctgacaaagacagcttgaacaagtaaacagagggatgcccgttcggtagggtatggttgaccttctcgacttcgcagtctggaacgtcaatgtccggcaaagagtcccgtttcaagtttaagaaaaattgccgtggaactctgacactgagggcatggatcttttggtcaatcaacacaaacgctcgcacaactcccggaacgcccgtctcgcaaagctgcagaacctgccatgtgctgatgtacagcatttgggcttgattgcggaagaaattactcaaagagtccgaagcaacgttgcttcgttcgccaaacagctgacgacggcgaacccgtgcttgtttttggatcttccatttttgcttctgatacttgagaaatccttcatagttatcagacatcgatggcataactgctggcaagctagcgaaggggtcaagagctgcatttgaagcattttctgggtgctttctcttctgggcgaccttggtgggcgttttggatttttgagtcgagctcgcgattgcttcatctagatcgccagcatactgaacgcgatggtcaagtatatttgcattcgtcgacgaaagtggcgtcttctcggacttgctaaatagatcagtcatcttcttttgcttgaacctgtcatccttcgtgttgatccgacgttgcaaccaatcagggtgggcaacccggggcactggatttcgaagcttctgaagtgcagccggaatggtaatcaacttctggatcacggatcctaaacgctctaagtaatagtcccaatcgataaccgttcgaggatccatatcgccggggtcttcttttagccattttcgcaagaagaatcgcttgatgttctcttcagctgaaaatatagcgacaggaatggctctttcagtgacaggtgtattccgtgggcgtgatgagatgatgtacttgcagttgagacctttgtcctttaccatctgttcacccaagaactctgccaggcgttttgccgtcgtgatggatgtggacttttgggaaccgtactcttccaaggtcttggacatgcttcggttttccgaaatgagatcgatcaactcttcatcggccaatgtcgttccatgttcgtataaaacatctaaccaccggtccgcaactcgagcaacagcggcgtaggtctcggcaagattagagccctctaggaagaatttgaagagctgggtctggaagatcttaatcaactttagctctcctcttcgtttaacttcgaatcccttgagttcagctaaagaaccatcgtgattgaagactgcatatcgtttcttcaggttcttgtcttcctccttcgatgttggtaaaatcattgcccggtacggtccatccacttcgaagaagattgaattttcactgtgagtctcatacttgaaagttttcgggtcgacaagtgcctggtactggtgattggtgtatcttgcatggacgaggtggttgagcatgacacaagggtatgagatacccaatttcttcccattcttcagagtgaaggagaagttatctgggaaccctcccggaagcatacaccaaataccatcagtatccaattccaggggacgaccgatgcgttcgacaagctctcttgccatctgaatgatgtgagcgcctgtcagacaagtgacaccagccatttccatggaataccaccgagagccctttcgcatcacatatccgtagaaactattgagaatgaccttgtgcgcaagctgaagagaatcgtacagaataatcatcttcttcgcttgctcgatctcagcggctgagccgcccgacgactgcaaactatcggctttgtttttccaggatttttgcttgcccttgaaatcatatcgtcggtcacggaaatctctgacagtatcgacatagaatggattttctctttggcaaatgatggcctctcgctccattgtcttgctatcgtgaatcttgtggtaaatcttcttgctgtaatcctgcagccgtttcttgaccactccagcctgctcttcgatgctcaattcaccgaatgacctcattggggagttcgggtaccggcctgggaaacgttcatttgctgtggcacgtcggatcatgttatattcatcacgtttggcaggtaagaattcacctcgccatgcccaaggcatgcgtctatcgcaggtttttccgggtcggttgaagtcgcaggcggcacaattcgactcatcaatcaacgagtctggttgcaatcggttggtgatcatgatgttaggatacatagaggcgacgtctaaatggtaaatgaaaggcacttcgtttcggactggatttttcttgagatcgagcaaacgctccacgatttgcgccctgacctcatcatagttcacaacatcgtccatgctttttttctcttcaacctcgatactgaatttgagggcgtggtcgagatcctcgagaagctcatcaatcgcagtaggatcaacggtaaaatgtgtagggatatcacttcggaagacaccagcttcaatactttcgacatggccgccgacgtaggtctccgactcaaggagatgaccttcataaaaagcttctgggggattcttgtgtttgttgggcaagacaatctcatgctggtaggcttgaaccatgagaagcatctcacacaaagttccagttcccttccgcaacgtttcgtcggcgctaaggggaatgatcgtgcagagcgagaagatgaatgggtggacatatttcatgtatagataataggttgcgacagcatcggaaaccgagtattcagctagggtctgtggcctttcactcgcatacggtgtcataagctctgggtcgagttcatccgggtcgtaaccaagctttgcgacagtcacggctttcaaaccacgacttccctgagggaggtaactgtcacggttgacccaggcgaaacagtccatatgcacacagttgtcggcttggtagatgtcctcgctgtttttccggaagccgatctccatatacatgtcaagtcccagaatactggctcttgtctccacaaatggccaatcgaagaagtcaccgttgtatgtcgcgataacggtaggcttggaaattttgatatgctcgaaaaatcgttcaagaactcctttttcattgggttcattgaagatgatgaaaggtccattgtactctggtttgggagtatattcaaagtcatgaatgtcctcagacacaatctctctgttggtaattaagaacccttgcccatcaatcatgtatgaaatcatcataatctgatccattgtggcgtcgggaaatttcagtggtaacttggtacactcgatatcaaaagcgagaacgacaggatcggcacgttgaagccgatcttccaggcaggtcagcgatatcacgccatgatctgcttccacattgtaccactttccaatccgaatatctgcgatgtgtcagcgacaaggcctcaccgagagtcacggaaaatactgacctttgtcaatgcagacccggacatggtatggcacgtcgtattctcgaatatcaacaataaaatcactcgcttgtaggttgccattaggtcgttgctcattaattatttcgtcgtcaaaaaggtcgatgccagcagtcgcactatctatcaattagttcaatgttaagatcgaaacacgtaacacagaacaaacctggtcatttcaacgtatgcgtccatcgcactctcatttttcttgttcttctctgcaagaggaagaatagtcctcctaacctctaaaaggttgctcacgttggcgaagctgagcttcatgtaggtctttcggtagccgagaaggtgatttgggaggttgagatcttctttctcaagtcgcttgaattttttgaccatgccgtcaaaggttcggcgacaccactcttctacctccatttcgtagcctttcttgactgcgatcaagaaataaggatcatattccacggtagctttgaaacttcctccgtcgtcctgcagaaaataataatccacaccggcacgacctccaggcacttctgaatcctcaatcgatgtgctgtgcatgttgaccaaccagccggctcttgtctcgccagactcgaatcgagggaagccgagagtctcatcgatgctgttggccaaccgaatggcctcgaatttctcatcttgggaggttgcctcggtcgagcgtaaggagttgaattggaccgtttttgagcgtcgaggattcgaggatgcagcactagatctgaacttgtttccatacttgctgggcttccgtggaggcattgcgacgcttcgcccggctggacttgttaaaaagtacctctagggagggaccagagtagaacatggaatgcgcacttggtaaatttcagatcaaacaagagaaggaataaagtataggtaggcacaaaaaaagatctggttctggggctaattgtgcctctaggagggtccagcaatggcttacgatctgctctaatcaaatcaatttcgatggtcccgacgcgttcgcgtaccgcccacgcgcgtccaaagtgttagtcagccttccggaataaccagccactttgggatagtctggattatctatactcccgatattgatgatcttcttcaatagcggacgaagacagctagtggacatctagaagcaagtcactctacacatctatggcggaagactcacgagactccagcactctttcgaaggctggtagcaacacacaaataccaaatgacctggccgattcgcaaaaaccgaaatacaatccgtctcagtcacaaactggaaagctatgggatgccttcggaaaccccgaggaaccggcgaatgcgctcgcccgagcaacatataagcctcggggcaaggaccctaaggatgttccatactccgagatcattggatcattcccggtctccgaaatgaccacccttcacaaaagaccgtgtgcacgagaatccttgttgactggcattggtgtcggattcggagttggtggtctacggggtgtgctcaaaggtatatctacattctttcggtattcggataccggaatcatggggctaatgtgtgcatgcaggacggtactatctatggtctgctggaaactgggctgtcggcatgtttgcgatcagttcattggcctcatatgaatactgccgctggcgacgaaataatgaattgagtggtatggcagaagcgctcgatctcatgaaccaactgaaggccaagaaacaacgtgagaaggatacggcagtggaggaagcggcattgcgcgcgcgtcttgctgaggaggaaaagaagagcaagagttggactaatccctccaactacaaattctggtaatgctggtgaggcatgaaaaggagtcgtggagttcatgaagtgtttcgaaaactgtatattccgatcaatagatcaagatcaagtagtgatcgacgtcatgtcataagtcatctctgtgtatcatagctctctgcaaagttcattccaattaatcatcgttggagtctcccacttgtccgaaagagaaaaaaatgtaaaccgcccatatgcctgcctttcaagaggaaaacgccgaagtaaagatatccaaaatgtgtctgcatattgcgcagctctgattaccccgctagaaattgaatttcactcgcttctggattgcaccttcgttcatgccgcgcaatttgtctagctcaacgccatccctcctcctttcgcgtcgtctttcacgagcctcccgggcttcacgattcttccattctgccacttgcttttgccgcttctgtgatctttcccacgcgattgaagcggtgggcttgaagcctataccgttgatcccatatccatcatccgttgggtctgatggattgtggccagttatttccgagtcatgccatacaagtgggtcttcttcagacggagtgtccgcgagaggaggggatagtcgttgcttgcgtttagatggtgacgagggattcaagttcttccgagagaaagtggctgcctttttctttgagggggaattgggcaaagaagtcggatcctgtgttgcgggcagctcgaatcgcagggcttggcggtcgctgggttcgctgctagtgaccggtagggcttcaggcatagtctggagctcgtggctgtcaggctcgcatgctttttgaggcggtagatccaaagatccctgctgtgagatgccagtcaaggtctcagagtccgaaagaaggtcgccacggatggccaactctccgaatcgtccagccactgtagtgcgaggactgtagctttccagctcgtcctcgtcctgaagtggaacctcttggaaactgtcaatagaggtggtcgatgtgggtgatgaagagggactatagcaatctgattcagatggctctcgtttgcgcttgggagaaaaagatgaaggtaagcctgtcggcatcatactgaaaacggacgtagtggggacgtcaccgagcaaccggatggatctcatttgtaaataaatagggtatccaccaccaagttgttctcaggaaatgaagctattcattctgcagagcccggaggtcagggctgagagggggtttggtcttgggcatgcggcattgaatcagactgtggggtacctccgtacaaggatcgccacccgcgcatacaacatacatcaagagattattatgtatctttagtctcgtttgtcctgttctgcaaggaatgaaaatagcttcccttgagagtagaagtcctactggctgaaaacatgatgaacaacttaaaacacttaattgaaaatatcagagcagcgatagtcagagctgctgaggcaaaaaggcctggtaataatttacaaatacctgcaagccgtaccaatcgagtcatgaagacaaaatcaaaacctaacgccatgacgaagactcccaagtcaaacacattgcgcatctaggccttttgcttcttcttggagggctcggcatccgtgtcgtgcttgcgcttcttcttcttgtcggactcgccctcaccacccacggactttctcttctctttcttttccttcttctccttcttttctttcttctctttcttctccttcttctccaccttagcctcagcgacttcggcatcctccatttccgcatcgctctggtcggcatcgacatcgaggtcagccagcacggcatccatggcgtttttctgcaaagtattagtctttaagtgttcatttcttagggtatatagaggtcaacataccatggcaacctcgttcttagtaggggcagcaccggaggagtagaattccaagcgctcctcaacctggctcttcagggcctcaccgaacttggtgttaggcgcctctgagaagttgtcaatgcgggaagcaattgaacacttgttggcgaggaaacgggagattctgcccttgttcttggggccagcgcgggcgatgaaggaagagtggtacagcagaccatacttgggggtgtttcccttggtcttcaaggcacggaaaagagccttctcggcaccaagaatctgaacggtagaggcggggtacttggagaggttggtcaagctaccggcgtgggagatcagacgggcgccgacgatttcaccgatcagggcggcaaggttaggagcgacgacgctcatcttggcaacaaggtaagcgtaaagagacttgcggtacttggcgagcttgacaacgcgctcggcgaaagcaacaacattctccatatcagcctcggagatctcttggcccatactagtcttagcagcatcaataatgctctgggcaacagcctcgtcatcctcaacaagggcggcaatgtcgtgcagacgttcgttggtcagggcttgcttatccttgatgaaaagggcgagctcggcgtagcgctggttgtcagagacaatcttgacgagctcggggaagtgccacgagtaccattcgcgaactctcatggagaaggtgttgatggccttatcgagctgatccagaatggcgatagcctggatgatgtggttgtcgtcacgctggacggagaactttaccttagcgcgggagtaagcgtgaccgagaccgagctgggcagtgtccatgtcaccatcgcgcagctgcttgaggagtttaccagcgtggagacgaataccacgaagcatatcctgaacgacctcgctggtatcgccagtctcacattccacgaatgagaaagcggacttgatgcttcctgccaaagccttgtcggcaagacccaggatcaccttcttcttcttgttcggcttggggaggttcaattcaaggaaagaaactagagtatcggatgcgacaccttcggagatgtcattgatttctccaagagcctgcttgttgttcctagaaattgttagtgggcgataaaaaaatgaaaaccttttcgtttagatagatagagcgtactcgaagggcaagaagctggaaagttcgaccatcttgccgaacctagcaaggtcattgacaccctcctgaacttccttcaaggcattgccaacagaatcaccctggtgggtaaccttgaaaagcgagtaacccatagggccctcgaaaagtaggaaatcggccatcgtgttagcgccaatacaaggtcaatcacaaaataatgataagaacttgtaacaccggccagaaaacctcgcaaagtgcaattcgatggggttgctggtgaggttggcgacggctggaatggacaatttttttttctcgccgctagtgcgaatcctaaggcagcgaaccggaggtatgacggtcggcctcggagcggacgtttacccgtcccgctgatataaccacgtgatcatatcgatgctcgaatgtgggctttttggccgcggacctaacgtggaacaagctctctatcatcccttaatttaatatttttgagttactggacgtgataccctgccattcattacctgggagatgtctgcaactcaactacttaaccccaaggcggagtcgagggtatggaaaatattcccagatggcccctcaatgatatgcccgcacactaacatttcacgcagcggagaggagaggccttgaaggtaaacatcggtgccggtgaaggtcttcaggatgtcctcaagtccaacctgggtccttcgggaactctcaagatgtgagttttctccgaatacacctgacatacaaaggcaacggaactgacaaaactcaggctggttgatggtgcaggcgcagtacgaaacccccgattcctctcgaacgacaccaaacatcccttttctgatacaagcttgctattatagatcaaattaaccaaggatggaaacgttctgttgcgggaaatggttcgtttgcccccagaatcccagcatttcgagcttgcgagctaacattaaacagcaaattcaaaaccccacagctgtaagatgaaattgttttcagagtctgatacgtgttgctgacaaaactgaaaggttatgatcgctcgcgctgcgaccgcacaagatgatatcaccggtgatggaacaacatctgtcgtcctgctagtaggagagcttttgaagcaagccgagcgtcatatctccgagggtctgcacccccgtgtcatcactgatggctacgagattgccaagaccgaggccttgaaagtatgtgttgcagattgaaagtcgaatgtccagatgggtctaacacattacctacagttcctagaaaacttcaagctcgagcgccccattgaccgggagctgttgctttctgtcgcccgtacctccctctcaaccaagcttaacagtgctctcgctgagaagcttacccccgacatcgtcgatgccgtgctcgccatttacaaagcccctgagaagcctgatttgcacatggttgagatcatgacgatgcaacaccggtcgtcatcggatacccagcttattcgcggtcttgccttggaccacggtgccagacaccccgacatgcccaagcgggtggagaacgctttcattctgacattgaacgtcagtctggaatacgagaagtcggaaattaactccggattctactactccaacgccgagcagagagataaactggtggagagtgagcgcaagtttgtggatgcgaagctgcagaagattgtggacctcaagaaggaggtttgtggaaacgaccccaacaagggattcgtcgttatcaaccagaagggtatcgatcccctcagcttggatgttcttgtcaagaacggcattttcgctcttcgacgagcaaagcgcagaaacatggagcgtctgcagctagtctgtggtggaacagctcagaacagtgttgaggatctgtctccggatattcttgggtgggctggtctggtctacgagcatcagcttggtgaggagaagttcacatttgttgaagaggtcaaggatcctaagtcggtgactatcctcattaagggtcctaatggacacaccatcaaccaggttaaggatgccgttcgtgatggtttgcgctctgtctacaacaccattgtcgatggctgcgtcattcccggagctggtgcattccaagttgcatgtgccgtgcacctgcagtctcaagccttcaccaagaccgtcaagggtaaggccaagtggggtgttggtgcattcgctgatgcccttctgatcatccctaaaacccttgctgcgaactcaggccacgatatccaggattcgctggctgctcttcacgacgaggcaactgatggtaacgttgtcggcttgaatctggtcactggagagcccatggatcccgtccaagagggtgtttttgattccttccgtgttctgcgcaactgcatcgcttccagcacaggcatcgcatctaacctcctcttgtgcgatgagctcctgaaggctcggcagatgagcaaatccggtgccggtggccccggtggtcaggaagagtaatgcactttctcatttacgaagtcaggaggttcatgtaaagtttaaaagggttaaagacttgattccctcacggagtcaggggccaagagccaatctattcaaaaatgcacaaacttcacgttgcttctcattgtcgtcgttagatggaaatacgtaatcagcgctatcgtacataaacttggaagctgtctcgttgggagaatcagtcttcttccgagctaacgctttggccatccccatcagacacattctcgcggggccaatgtccctcaaagccttcttctctgactgggtcgtccagggagagatgatgtgcttgagcccactcccagacatcggattttcgaatggtgaccatctgacctggtggtgtagtattgtcctccgcagctgtacgagtggatttacgttttttcggggtggcctgaggttcaaataaccccatactcttgagtgcagtgatcacatcctcggtcaacataccagttcccaggccgagttcttcgactgtaatggtctcgcgcaaaggtctcttgcgggagcctttaggggttgagctgggcttctgttggtcggtttcaagggagctgccgctaggtttaccgcggagtaagaatcgggcaatccgttcggcccagaaacggacataacttttgtggcccagctcacttagtggcttctctggtccaccgatgcacccaccatttgagtcccatccgctgagcttgtagctgacccccatcaacaacttcccaagctgcttatgttggtaaggcgggaagatcaaaatacaggcaagattgttcgcgtcccatgagagtttctcttttgaaaagaaaccgagcacaaagtagctgtcggggtcatccgggtcggtgaaggtgaggatgtagtacaggaaggttgcgacgtcgaaaaagactgtcttgtggtcgaggaagagtttcgcaaaaagggacagattctgtccgaaaagtttgtggttttgtccatcaacctcccacactgcaaacccgccatggtcgtagactttcatgcctggtggcgttattcgatgctcgcaggcgcttttgtgttcttcaaagatatcttcatcgcatgagtatcgaaagcaccagcgacagacgtagagtcgatcggcgtccttggcgacgaggtcttcggggtagacggattgattccatggcttgaacaagagatcgcccagtacgacattgttcacgttgcgaccggctggggtctgcaatggcgcagacttcggggtcgccattggattcttatggatatttgagcggcacaacgtgatatctaagttgtcggaatgctaggtttcgggagcgttcaagcgatgtaccgactccaatggaccagccattggtattatcgtggaaatgagacctgtaggtggaaaaaaagagtgggcacgatcgcgcaggcattaggcgaccgttatggaaacatcctctcaataataataaatgtcattcattgcccattgaatccattcaaatgtcccgtagtcggcgcctcagattccaggcgaatatctaatgtcatgtgatcggagcggggatcctccggagagcttcatcatgctctcatgctctctttatcctgttgcctgaacctccctgcttttttagaatttgttgaatttcttggatttccccattccttttgaaaaatccgaacttgaaacctggaagtgttgccacaggcggcagcatatgaatctcgtgatcttttttcccgtttatacactcgccgtctccaaggcctaagaggcatcataattccaacccatttcatatctttatatcaactctttcaactctagtttatcgtttttgtttttgatcctgtaacaccgccacccacctattcgtgttcctgatccgcaaggctcacagtacatcttctctacgatgttgaaacccttccaaatcagaaaccttcgggtatcccaacccgggcagtctgcggattctcgtactcctgcaggagttgtccaaatctctgctacagattacgatgatttggcgtcaaaccatccccgcgcaaggttgacttacatggatgacgatgatgatgacgaaacaatcaccgtaagttcagcacagtgtttatcgatcatcgaaatctcactcttttccttaggttggatccgctttcgagctctctcaacgccttgaggagcccctagacactaacacacagcttgaatccgtcgaactctctccccaagatatccccatgcacatctttgatattcgtcgatcatcaaactccgtgaccgagttgtggaagcgatttgaagataacgttccaaaacaaggcatggctgatgaaaaggacgagacgcaagctacttctaagactattgttctcgaggagcaacatgaagtcccagctcctcatatcacgatctcgccgtcggtctctagggaccagcctcgatctctcatggaagcattcgaagctgagctagcagacattctcaatgacgctgagtactcggagagtcgagtacctgaacctgactcgccaccgactgggtcatcaaccaacacagactcagggcgatcccctcatcccgttgagattttggcagcacaggttctagaccacctgatcaacggagccactatggtacaatctgaatggagatcaaaaatacccgagctacagcgacaagtacacaatgctcagaaacaatttgaggctgcacagagaactctgcctcagaatgtgcaagcctcattgcggacactactcgccactgttgaggctcacctaagaaccgcttataataatcttccagatggcggaaggcaaatggcagaagatgccttccaggcaggaaggcctgttgctgagaatgctgctgatggttttcgtatgatggcctccgaactcaacgaagtcggaagaacattatttgccgcatttgaaagcgagtttgggcgcgctacaccaacagcccctgcgtcgaccccggcttctgagatgccaaattctagagcaaccgggccgttctttaactctagttcaagcaatgaatctgcggctccgagcactttgtaccagaactcaggcgcacattcttcaagcacagccagaaacgaaaagtcaacggtagactcaggtcatccgcactcatctaatactgcacaagcaggagtaccccctatccaaagttgtcatggtcaacccgcatcccctcactcaaatcattgggcacctcccgcatggcctgctccgtcctggaatccattccaaacttataacgcacccccgcctccgtgtcctccaccaccggcatcgctgccgaacttcacttactggcctcaaaggccacctgcgcctccacctcttcctacgttcaattccccgttgaaagctacacagacatcgaacgtcatgtctggagaattgaaaaccgattcagcaactaagtccttgtttattgggaatgttggtttcaaggttaccgataagatgatacaggatgtgtttgctgccaagggattccttgtcgaggtggatctcccattagataccgcatcaaaaacacatgcaggcttcggctacgttcatttcccctcggattatccggcttttgctgcaatggaagcattgcaaggtgctgtcattgatggtcactcgataaaccttgagcctatgtatcgttcccccatcgaaggtgtgcgtccggtgcagatttcacccaatgccagtacaaccacacacgacactcagacagacagcgccccggatgagacgagcgatataaccgatgctccctctgagcgaaacagtaccacatcggggccctttgcctccccgcttgctatcaagctacaaaatagtccatccaagcctggcaaaacggataatcagacggaaccgtccgcactacttgattccccaagtgacgatcctgcatttagcgcacgtttcccctcgcttttacccgagacgagtgcacagcataacgatccattgagtggtcgaggtgtttcctcatattcgcacacggagtctggtttcccacctgtgtctcaatgggaagcccaacttctttcaaatcggcaggaacaccgcggagcagaacctataactggtgttttgcatagtcaatcaccaaacgacctagaacaccctgaggtactctcaactcacggttcacccttgcatcctaccccgaaggcatttgctggatctcaaccagcttctcgtctagaggcagccggcaatccgtcatcaatcgttggtgctagacgaccttccgaccatagtaaatcaatgcaagatcaaatcggtcattcttccggtgccaaggagactgtgcgcccagtgctagatgtcaatgacccccagtatgcggtcaaactgaagcgtcgagttactgagcaccaaacttataaaccaaatcattggaacgctgcggagactggccgtcgtaatcccctcggtcattccgcgagcgtgcgtcgtcctgcagacacatgggctcggctgtctaggcgagaacgaaatggtgtatcttctcacgagcgaatccccggaagcttcccagtggacgatacaacgagggtcgaactctccagcactcatgataccaatgttcctgagtcggatgacgggacaatcgaacaatgtgtctctgctcttgtcgacatgggctacggggctggacaggagggcggacggtcgaggatggctgtgtatgcagccatggcaaatggtgtcctcacggatgcgattgatatgattgaagaggaaagacagatctatgaacggcggccttcgcagtgaggcatggaatattggcttgctttttttgtttcagggttatataatgacccagtcattcctttagctacagtttagcttgactggacctattgtggcgtcattcattctcagtagggttgaaatcccactttttgctttaatgacttgctaggccaattatccatgggacttttcgagacctcaacctactatgttgcatgtcccataatgaattagtgtatctaccttttaggtgagcttgacttttttttttttaatatccttcttacgtttgggaaagacaaagtgtctgagttggtagaccgtaggagtggcccgttatatataaaccggtgtacaactcaagaacataacagtgaaatgatagctaacgatgtatttatttggagattaattcatttccggaagaacaaattgctaccaacgcaacagcgctctaaaaggatacaatcagtggtctttatagtaatgtacatagtaaatacagagaatgctaatcggaccgacatcaatgccgataagtttcctggcaatctccgaactcccgatcatccaactcacagcagccaggaccttcagcaatgcagatatggcggcgaaccttcgccacatctgtgggcagacttaatcaaagctcaattaattcccgtccctctcttgttcgatgcgcacagatcctccaagccagcaagaacggtggagtttgcagcttcgaggaccaagaaatcaaagtgaatgggttcattcgatctgtacggaaacagaaacgctttgcattcgcagaaatatctgatgggtcgaccgtggtgccattacaggcaattctaaaacccgcgcaagcagcagagtatgttcgcgtgagctgtggtcctcgacttgtttgtccatgaagactaacccgagctttctttagtctgtcaactggaactgcgatcgaaatatcaggcatatggaaagcttgcccaccgggtaaagagcaaactcatgagctccaaacaagcgatgtcaaaattataggcgcagcggacccagaggtgagaccaagagcatttctacagttgttgctcctcacactaaccacgatacatatggttacagacgtttccaatccaaaagaagtaccacagccccgacttcctgcgccagattccacacctccgcattcgaacgcccttcaattctctcctttcacgcttccgatctgagtgcatattccaacttggcaatgtcttccactctcatccagatggagctttcacacaagttcagcctcctcttataacgtcctcagattgtgaaggtgcaggtgagacgttcacattagcaccacgcggtgccgctacacccaccaccgagaacgagcactttttccgagcgccaaaatacctcactgtatcgtcgcagcttcaccttgaagcttatgcggcagagctaggaaacgtctggacattgacacccgtgttccgggcggagaagagcgatacgccacgccatctcagcgagttctacatgctcgaagccgaggtcaatttcatgtccgatcttgactcgctgacagggttagtggaacacctgctacgcgatctaacgcgtcgtctatataatactcatgtgggccaagagatcctgtcggcaaagcggtctggcgagccaggccaggaaaccgcagaggagacgacaggatctctacggcaaagatggaccgatctaatggatgggccaaaatggcaccgggtcacatacacccaagcagtggaaatgctccagcgtgctgtcgccgaagacggagcatcatttgagcattccccgacatgggatggaggtctacaacttgagcatgaaaagtatatcgtcgaggtgctccatcaagggcgtcctgtctttgtgacagactacccgaaatccgtcaagccgttctacatggccccttcgcaagtcgccgatggcagcaacacaaccggagagacagtggcatgtttcgacctgctcctccccgaggtcagcgaagtcgccggaggctctctgcgcgagcatcgcctgcctgatctcattcagaacatgcgtgagcacggtttgatcaagccccgacagattcccgagtcaggtgatacagctccagatgagtcgctgtatccccatctcactcccgacgaggacctgagccacctccaatggtacgctgacctccgacgctgggggtctgctccccatggaggctttgggctcgggtttgatcgattcctcggatatttgactggtgtttccagcgttcgggatattgtatccttcccgcgatacttcggtcgcgctgattgctgagacttatcagaggtatcacccagtgtatgatagatatgtaaaataatgtacatgaaaactaaatagttgaatagagggaaagttggaaacatggaaccgcaagcgacatgagctgatctactgtgcaacttttgactgggcctggatttgctccattgacaatgaatctagtatcaaccggggcccaacgacgctaggaataaagtcgccgattgattcccgaataggaactaagacaggcacttatccgcagacatccgcataatggagcctccgtcgcgctatgtgcccaaatccgactagtgagaatacaagtctcttaccatctgaagctaaaaaaagggcttgtgctaaccggtagtgtccggctcagcttactttgtacattagtctcctttaaccattacgcaattagggcaaaggtcacggtggcaagacatttaccacatgggcgttttattgtcctagagtactccgtaatggaaccaaggaaagacagaagacgaaaacgactgaattccgaccttcatactccgtagatgtcggactatctccgtaagagctaggagcagagcttatttatttacatatgtccccacctttccatgccgatttagcctatcttgtttgctagtcagattttaactttaaatcgtgacttcgcagagctccaggcaaatggatagtcggccgaaaaagaagctggttactgggttatagtgaatattatgacattattggatctagcccctgcccgatcatcctagacagccagtcgaagaagccaaaacaattaaaaatccggaatgctacggatttgcgagagaatattacttccgacaccagtggcctcataccaaacacgggagacatttgtaatgtgatatcaaaaccggatgataccagtctgagcacagagttggatctacgtatgcttactccatattttgacgtgtccagggctaagcatcgaaggaatcaggagtcagacactagaggaactagagtgcgacatatactccgtacaatatacaaacactgcacggacgaaagaaaaatggctgagtttaatttagcgaaggcaaaaataaggcatagatcgtgcattaccaaagcgccaagtgtagacgatcgtttcacgataagagtagctctgcgcaatactccgtagaccgtggcatattgccgtacggagcatagtactccatactcgtatacggaggccatgtacggcagatcttatccctgattttatgcaccggaggtccggaccccaagcaaagccaagcactgtagtctggaaacgaggcgccccacagaccaaatgtaaaaacaatggggcgtggcactagttggggtagtacgtaggttgctgatgattggcaacgtagatgcatatcagtaccgcgattcggaaataggacagcaaggcggatatggcaacggaattaaggacaatcgagtctcggcgtaccccattaggaaaaaaacgtggtcctccgagtggatttggagtattttgactcacgagtcactttatttcggacctcgcttatttatgcctagcatttttggatttataggtttggattgccacttgtccttattattattctgagagccaatgattgtatggctaataataaaaagaccatgatcagattaacgagttacagctatgaatagacgtgtacagccttacaacacagccttgaattaatctatttgactttgataaaatgagccctgattccatgccaattagggggttaggatcagcaggccaaggggtcccaaccttaccagggttaagcataagcagaaagaagttcgggcagtgcgcttgagtagggcatccctgtctgacgtatcacattgcagatagcctacaggagatgtgatttgtggtaataataagtaactagtcaaataatatcccattattttagtatgcacgggtagggtaattgataatccaggatgattacaacctaggtcaaggttacactccaagctaagacaatattacatagttcaaacagatcaaccttcgtattcggttctagcagctccccgaggaaaataatattccgccacatggtcatgtaagacaagcaagttggaaccttggaaatgcctaggtaaagtcaagtaaagttaagtgaaataaaggtacggaagaaacgttaaccataaacctgcagccacaggttccatggttcgcaatgagaaaactggcttttaggcttcgatgacattgtcagccagcctagccactcaaggttggcacccgcttggcattcacaagctcttggccccaagagttaccaaggtgctacttgcccttaatatgtaggcaccagcatttgtcggtgcattgccttttcttagaccgccgtggagtatgatgtgttgaatgttatttataaagttaatattacaaacagaccagaataaaatgaaccccatgcaatgaaacataaccataaccataaattgaattaaattaaaaggaaagaaggaagaaaagccatttcagcatattctctattcatctagacaatggatactttaattatgctagtggagataagctcgtgtgacgtttcacaaaattagttcttggcaacctttaattccagggttgcaacgaatgcatgacaatacaagaaacagttactcgcacgtcatttctagtcgattatagatttgtgtcagttgtatatttgatatctggtctccgactggagagatcaaacactgcagataccttgacttggggtttataacgttagaccggatcactaatcggagattattcatgagcaaaggctgtgtagcggagttacctcttgatatattcaatccgaaggagcccgaggccattaataatagattagcagctaacgaatacagttccagaaggcccacatgaaccacggtcggcgaaacagtcggtttatcccgcaagggtattctatcagctggtgagatatagttagcgagatgtggagctggacccactcaaaaaaaggagtctccgggtaaccggatagacctcaagagcatacgcaatcgatattgtttttctttacggagtacggagtagtgaagtgcatggcagctctcttggattacggagcagaaacccctgaacccagacattggtgtcactatgccctaggtgtggataagggggggcgatgtagacctaataagctggagatgggtttccacctggcaaatgagagacactagactatcccaatgtagcaagacttcgggatcacggctgttaagggtggatccaggcgatcttgggaattcgaaaattcggtcggggcctgagcttctacactaacattgaagtaattgtatggttgcatgctccaggtaagggaatgcctttagtgatctgagttggtatgcttcttttagcgttgaaggaaatagagccgatgttaaggtgaaaatgtaacgattccggctttttctgataatgatcagctgcatcagtctgattgaaacttggaccctgccagttaacctcgatcatttcccagagcctatcattaaccgttaaataattttgactgtggcacaagagcacagcataatcgtacggagtattagtccgctaatccttatatcttgcatattcaatcatacgcaccaaactatatcttccatagcttggtcactcaagccttgtttcttattccattgaacctagagcaaaaaagcggtgcgaccttgcacactccgtatacctggtagacggaagaccgggtcacgaaggtgatgttttagtcacacaggacggcgccatgtgagacatgtaatgcaggcgatataacgtatgtaggaagtacgctgacactatgatcggctcgtgccatgctttctgggaatagagacacatggaccccccagcgttttaaacttcaaatgggctgaagccaaggagaaaatcagctgccaagctggactagcttccccgaaccctattagagtgatccttgtgcaacgggggagtttgttggcgatacgctttcgctggcttgcattattcggcccgtgcgtgacagaatcccgaatagagttatagcgcaagttcaaatatgagaaagatgtttctgacaccttttacgtatgcaatgtaccaatattggatttagaatgtgaggccctacccacctgcgaggctaattaggtacaaggctaaatctgcacggcgaacatgaacggcacggagcgcagactcggaccagttaaccttatcgttgagtcaaggtgtcagcagacatgattcagtggaatcatattttggccgaccgcctggtagttggcggatcatgttagtttaagccattatttattgttcttggtcctacacgaacgttataagtcagatgtgaagcagtgcactttctaatgtagcctgtggctactccgtagtatagccagtcgtaactcatcatgttacgtggcttgctgcctagctcgccgtgcatcattttatgcacgcaaacaatatacgtacaaaataggaccgaccttgagaccgaaacccggagatttcttgatctacaacactccgtatgtatatggagtacggagtacactgcatcggtttagtttatgttttcttttccccgtatcattgctttgatctggactaggattttgtcaagctttgtggtcagcgcagttaaaatccaaacactgcgtcattggacctaatacgagtacgagttacgaggatatgaccactgtggcttaggtttaccatttttagcctatgagatattgaatatctgatataaattaaatgtcccgggtcagattcgctaagatcaaccttgtttggatgtgactcgtatgggatttgcctgccaagggatagggtgctggataaggccacatcggacgtaaccgctcaaactatgtttcgacggggtacataattattaatcaatggctatcctcggtcctattgctaaattccgatcgtcaagtgggcttctattccctggtaggtggaaaattactatgaggactcttctttaagaatggcaattgaattggtgtttcaataacccggttgaatatctaaggtaatatataccgttgactacatactacattgactacgactaccctacaatataagtatgttgtagtccataatcaccaagtcccacaatatagaattgataaagttccccttttgccaataatgaaaatacccaaagtggaggtgtggatgccttataagcgagcataaagttcagcgccggtctcctcgtgttggattaagcttaagagttccgcactaacctttttttgtgaccagagcgccacttttctgacacagaccatttccaatgttttcttttcttgtttcttaccatacggaggattctctgtttattaatgttgatcctattatatttaatctatcaggaatggagccgtgaaggggccaaattaaccttactcgcaagggtttccaaaccccgtaaagccgagccaagagttgcatggcattaactagccaacccggaaaactggttcactccccgtcactgattatattgaatttggttgtagactcacagttatgatccatgacgtgcttagatagctctaacatataattactccgtacaggctacacaatctgaaagcctttgtatagccgtgccacttcagccccatgtcgagaactctcctttccaaggtttcccatgcataaatcgtgtggatttcccagatccattatttccatgtgtaccgaatccaataagaaactaaaataaattaaataattctcttggaatctcggcgtttaacaagttccgttcgatcttttcgcttggatcgcttgacccgctcttcttctctccgcttcccttatttaaccttcttttttatgatttcttcattgtttcttataaagcgttgcgggaacatctcctctttttagttttcctcttttccctcttcttctagctttctctttttctctctttctcgttggtattcactttccgagacaagaacagctaagccattccttcagaaccccggtggagtcatcatagtaggtcgccccccatctctctttgtgccttttagccttggctctctcccttgtccggcattcttatgccttcaagcccacctggcccacaatctctggtctcttcttccattttgggataaagccttgaatcttgaatcggtccaaaaaaaaagaaaaagaatgaaagaatagcctagccgtcttgagctcaaagctcggccttacccacgctggcttccaggcttaccccatactgactcggatcctggttccttttatatttggacctgaaccctattttcgtcctctccacttgcgcctctttccttttcccttagatctaactcattcctctcagacacttttcgtactccatttacccttaaaaatccctttatccttcaacctggcaatcagatcaaatcaaccggggtcgtcggttgactcgagagcttggatggagacgtattacgggcacgttcgcacgcctgcggacgctattattcttttcgaggcttgccgcatcggccttttacctcgcgtgcaacgacgattatcagagaaagagcgacagtccatccgttccggttcggtcttcgtatgggatgagcgagaagcggggatgcggcgatggaccgatgggaagtcatggagcgccagtcgtgtatctggtagcttcttgacttatcgtgaaatggaaggcaaacgcggaggtggcagtgtctctcaaggctctgcctcccgcggaggcaagacgccggagagtcgaggcagtgacgatgagcgcgccgatggaacagatgagggaccggatgggtaccgttacaaaccagatggtttgatgaagcagtctttcagtatcacgacatccaacggtcaacacttgcatctgatcagctattattcacgctcccatccttctgccgccaacttacaacaaccgacttccgatcctgccctgcgtcatgtccgaccccagaaaggtctctatcccgagtcgacagttaatgatcaacaaaatctccctgtcgttacccgtggacctatgccaggcgctgcttacccaataactccgcatcccctcggcgcatacccacgcgtcactcatacacagccatacccccctgcctatgcttggccgcccacccctctggccaccccaccgactgtctcggttcaatatgggcctggtccttcttatctccccccggttggtgccaacggacaccctcattatggcccaccacaccatcagcctccgcatcaacatggtggactcccaccccctccacacgggatgaccagcccctatgatcgaccacatatggaatcaacattacctccagctggaccgccaccacaacaaccaagctacatgaaccggtcgccgcgatcaatacatgagcatgctcacgcccacgctcaagctcaggcccatgctcatgctcaagctcaagctcacgccaacgcacacgctcacgcccatgcccacgagcaacgcaacgcaccggtctacggacatctagttgatcctcgtatggcatcaccacgcgtgccagtccagtccctgacgcagtcaaatggacacgtccacagccctcacctagtgaagcaggagcatcctgccgcgttgtcctctctcaaccccattgccacatcaccgaaatcttccgatcctgcgagtactggaaatgcagttcctggcatcagctcattgatgaatggtgcagcgttggctcctttccccccatcgactgcctctcccggtggccccgccacgagcttgaatggaaaccccgcacagagctctttcgccgacgggccacgggatatccctaatgagaagatcggattcggaggcgaggatacgagagcgctgcgtcagctggaccgcgccttcatcgcatgaatcgctcgatgaaggttgtttgatggattcactcaatgaaacaaaaaaatctatcttaaccccaacccgctcacagggttgatgcccaacttaacctcacactttatcttcatgtctatgtttctttatttgctgcggctccagggagtcttgctgctgttccagtgatatccttttgttttatctttgtatttgtcattattagcatcttgcatgggtcggggcaattcgaattcttgcttttatgtgatcgggtcatggatacgggttcaatggagccttttcatattatgcattgggatcggtctacacggttgggatacggcttttatttctaaatggactatctgtgtcttgtcaatcgacttgctttttccatctataactttgcgttgtgctctccgtatacttagacgtatctgtgtagacacctgagaactggcttggaatccgtcgtactctcattgctttcgcgtcacatacttcatgtatctatgtacggagctctgcatgctgactttcctatggtaagcctgaacaatcatcaactttgacaagctcgagctatgtcgctttagcttcttttgacgtccaaataaccgacgactcctcggactcccatgttacctaggactccacctcaggcgtctgggcaatgggaatgagaaagtgatatccaagaccagtaatagtgtcgtaatcactgatctatatgggacgtcgtaccttgtgatcatagtgtccctcctaaagtgaatacgcaacgttcgttcgacattcctgaccattttacaatcttacaaatggctgcctccttcgcggatcatgctcatctcgaatcatcgaatcaacctatgagaattgaaatccattccttacgctgctagttattaatgcacgtatcagattacgtggtagaagataagtgatcaaccaaacgtgatgatctagctactgccatgaagctctctaaagagcttcatacgaacaaaaccacaaagatctcatcctccagaatctagaagaaacatctctgcacgtggataaagagactgccaacacggcaagctacctgcgagaggagagaaagaaatgccaaagagaagtctacaaactgcatagggaaacagtgaaagcgcccaaatgcatcagctattcgccggcttcaaccaatctcttggtctgggacgatctccatgggaacaaggtaattgtcaaacctcctcagagatctcattggccattagctcaactctatttgagacctagctattcttatcattccccaatgcctacaccgggagagaaattaaatctcattcggtgtgagctataacattggcctcaaaaacaggaacaagaacaccaaggaatgaaatcatttacgaggctttgcccctgagttctccccgggccgggtaggtgcatgatggtcatgcagaggcagctttgccgaatgcccatctctcgcctaggaataccttgtacattaggaagttctgatctgtcgattcgatgataccaatcacctgaaggagtctgcagaacttcaaaacttaattctgcggtcttttatttgcttggattttggcctggctggacctcgtattctgagactgcttcgggaagatatgtgagggttggatcaggctcatcaaaataggcaaggtatattctgatacagacacgtcgatagagccctggttaatatccatagatcacggcagacaaactcggggaagggctccctacattgagtatagccttgcccagttagattgtgttgccttaaatgacgtatccgcgctacgatctccgttgataaactagtgaagtatctgcaggatcccgtggctgcaatcctcggcgtcaccattcaactagaataccttagaagatctactcggcccataacttctgtactccttttacttgattatctggtggtattactcgtagtatagatcggcacccgtgatatgcctggttccagaagtccctagatattcgcttcgtggagggatgtaatttctcacatctaggttcaacggcggtttcaaaatggaagctggttatcttggttgagaagccctgtctgggtttataggaccctcgaattcccactacatgcggtatacggcatcgggaatgacagttggtacgcctgggttcattttgtgatagagaccaagtcaaacgggatgattctggatttgatgcttgttttgggccaccaacgatggatacatcgatccagtcgcttccgatacgagctttactcgaagtcaatgctgtcacaacaattgtgaacgaagttcatgaacctaccattcgggacaaatcacaacacactggcgttgtgcttattttctaggatattaattgaaataggaacgtgttacatccttcaaattatacgaggaaatctcgctcatgaaccagagtaatgcgattgtcaccaaggagaaacaggtaacctagctcgcaagagaattaaccaatataattcctagtctatctggtcgacttcaactacatagtcataaagcaagagcctaagaaggaccgtgaccttatactattccttgtgatacatataacattggtttatgtcaatgcgaaaaaaagaggttcaaaacatattgccatctgttaggatgtcgatatataatgctgtcgttatcattggatagcatctaagctcggtctttagtctcacagctagtacgaaaagctccagaactgtgaaatattctggcccctgtataacttcgaagagtaatctgagtattcgctgcgaaacggtgaaacagtctgtatgaattcaagtacacccaagaatggcacatatactcattatttccagatctccaaaatcgtgaaccttccgagatggcatttttatatttcaccgtagtactccgtagtgtagacactatgtcatgtttcacaaattatctgttagtctgagcttcgtgactcccgctaccaagtggatgcttcctgactttgagagatccgtcgaatacggccgagacggtggattatggcacggtcaacatagcgagagaacatgttccgactgcgactaaaattcatgtattattgccgatgggataatagtcttgatgcctctaagcctactctcctatctagtatagtttcgaataccttgagactatacaagatcaccaagagatgtcaacgaatacatatcggatgacataaaaaaaaaaccagtcccgctttttgggctgctaagctgggccgatatacaacctggggttctgggctcatgtcctggatccgaaaacgttgagacgtggagcattcaactctcacgattgaagtaagcacattcctctgggtcataattggctcttaggaagctcgagggatctgggagaaaagaaagaggaacctcatgaataatttcgagattgcctatccacaatccaccagctggatgccgatcacactatagccagcccctgtcgtatgagaaacaaaaaccagcatcgcatgatacatttgaaccctcttactaagtccaggtaactagttagtcaactagttagttagttagttggttaaatacctcattaatgtttgttcagtggctatattcagaggggtgaagtttagcctgctttgtcaggccgcataagagtagtccgagcgtttgctcgatactagccacaaaatgctatgggtctcttatttcgcatgtcgtgcgtcatattatctcaaaagagacatgtttcagatatccatagttttccaataaatcccgaatggcccagagacctcatgatcaacgccgacgaaattccgattattcctatgggcagttggagctgaaagaggccgaaccgaaccgaagctaagcgagtggagcttgaagcgaagtcaattcttttcctataggttatacaagtatgtgcaaggctacaaaaagcttactctgaatggtttcattggagagattggaagaattgaatggagcctgtgtactccgtacggagtacaaccagtagtaggaaggtggaagccgaaaatttttactgatctgactagtgtgctgcgcaaggctcagaaatctgttcaagtgtcgctgattggtatatacagcatcgtcggcccaattgtcgtgcagcggttccggtggtgcctggcggggcttcccttatgcggcgaacaccggttagacatcatctcctcgtgtccactgttggcggcgtgcaagtcttctctcgggggttctccgagcgtgactgggggtaaccggattaggcaatagcctcactccacatctgtacgggggaggtcaaagagcaagaggaagagtcagagtgagaggccgagcgaggggaaaaagtacgaggacaagctagtccagaccttaacttcggcttagttactggattggtctatgccctggaggggggtaatatggctccgacctatgaaccgagcctggaaatagttatgtcctttcgtttgtactccgtttacccccttaggtagctatatggctcatttactcacaccccttgctccttaccaggaacccgaacaacatcagttgaagcagccatgacttctttgtttccggccccactgggcgggaacaaccgttgacccgccttgaaccttggaaacggatatttctttcattgttgaagatagtatatagatgtagatgggagaaggagaaacacaatagtgctctgtagtacggagccagagtggggatgatgcaacatcgaaaaagcaaagtgacttcagggcgttccccatattttcacgctagatcacccgtatacattgcctgactcgttagtgccacataccgtcagcgagccattggctcaggtcgttggtcggccccgtcagatcaatggacttgcatggtcgatctttgagcaaaaaattgaaacgaactaaaaaattgatttgagctactcacataactagcccggccctagtgcatagacggactccatatgaaactccacgttcgaagcgaagacgctgtacggggtatcgggcaaccacacagtagggggtatgaaaatcatcctctctgccgtctcagctgatgcgtcaaaatggttaaatgctaaaaaaaagaaggacgacattggtccgttactaactccaaccgagtgtgtttccttgttagtctcccggcagatccacgggggccttgcgcagtctgtacttttggtgacctcgccacattccacccctttgggctgtgccaggttagtgagcaggatatgatggaaagggtaatcgacgcgaatagtaaaaggaagagaatagggtctgctaatagatcccctacagaacattagctctattctacagacggaatgacggccacggattccgatccttgtcaattccctgcagcggatgtccgtgctggtcgcacccagaagatctggcccactctttaccccagatttgttggcgtagcacagagggagtgagaaacgaaaatagaaggaaatttcaatgtggacggggatgagggatgctgcgacccgagtgatggaaactgtcgccgagaatagaagatctccatcggttttccggtcagcgcgcttctccttcctaaagagaaagggaaggaagggaaggtaaaagaagattcgacagtgtggcttgtacatcagatggttcgtcggaagtaatattaactcatttcttagagtacacatcattctacctgaatgttctacggattcttgtcttggcctaaccctaagtccccccacggatcaagggggaatgtcttatagaatttcatctggagtacatatggaactcgtgacgaatcacccacgttatttcgtaggaacatatgtaacatgtcctatatagcatggatgtaccccgtagactatgcaagacactctgtattatggatccgaggtcgatcccaaggcaacgagtgaaaaaaagaataaaagaaaaagaattaaaaagaattccagaattaaaatccccaaatgaaacgtaacactccatatgatgccctggtcaatttgctcggcttcttcactgcaaatcagggcatcagattcgacatgcttggcagcctccccgcatagcaaagtttataaaggaaataaatacggagtcactgctccgtacaggtgttggagagtcgaattggatattgattttctttaaataaatcacgcaaatgactggaatatacggagtactccgtcctccgtaatggattctgatttataggctaatgcgttcacagctagagactaatgtagcctgggtttccattacgcattagattcacccaagaataccctagcatgtatatattaatgtccttaatatccttctaactaagttactagtttcccctctttgctcagctcatacctggattgccatcgaaagtgtattctctgatcacacgcactgcggtggaccaagcacattttcccgtacgaatttcctccccctccatttatacccgacagcccctctcgtcagcgcgcatcggtgctcttatcggatgccctttcttctatccatgcatacctcattcttcacccaccaggatttgaatggctctgaggtgcaggagaaccaccgatcggatattcccatctcttcattaggcgttcgtggctccgtcatccgcggcagcacgtccagtgccagcaccgggattagcaccgacgatgcctcggtcgattcactggattggaatagcgaacactcgccggaacaagaccagccactgaaggggtattcgcagttcgatgcgcaattgaatgatattatggagttgcccaaggtggaagaagtggaagaacttggcgatgacttgttaaatatcaaacaggcggatgtggagtcgggcgctcccgctgttccacggaaacgtggtcgcccacgcaaacatccactgcctgctcccggaggccaggccaaggtcaccaaaggtcgctccaagacgggttgtataacctgtcggaggaggaagaagaagtgtgatgagacaaagccgtcgtgagttgtcgtgatccactggggtgtcttgtctaacaggggatagttgccaaaattgccagaagaatgcggtcgtctgcgaaggctacccgctcaaggagatctggaagagtgggagacagagagtcgctgatggtaggtgtagattacattttacattctaatcttgactgttcgcttgagacactaacttggttttttccccctgtagctcgatcccagtctctgacagccgtgccgcgcagtttaccccttctcatcgacggtatcgaaacggacgtcgaccgtcgctttttggaccattttgtgtacggcttcagtcgcgtcctgacgctcatcaacgatgattcaaatcccttcaaggagattctcctcccgatggcgacgcaacatagggggctgatgcattcgttgatgtgcttgtccggatcgcatctctcaggtttggatcccgaaaccaagctgaaggagcggaaatactttcatttccaccgcgctattcaagatctgaaagataatatcaatgcgtcatcatcagcccagagccccaacgaggaggatcgattgttagtcgaggacccgatcatcgcatctaccatcgccctcagcttgaacacaatctgcgaaggtgaaaccaacggcgaataccgaccgcacatggatgccgcccggtatctgctgttgtcacagcagccacggaacgaaaaattccgccagttcatcgtcgagttcttccagtaccacgacgtctcaaactccctcacctcgcttgaccgccgtcctaatctcttgcaccccgaactgcacatgcccaacttcgtacccggcgtgtcagcggggatgttcctcggcgtattcgatggtctcttcaactacatctcggagatcacccagctccgcgaccgtatccgcgaacgcttcaacgagggctatgagccagccgtggactaccagacgttgagcgaagccgtttccatcgatatggccatccggaattgggagacctcgcacgagcccgataccccgaactggtgcctggcccaactataccgccagtccacctgggtatacctgtaccggacgatccggccctcgcgaccgagcgataaaatcgcgcaggtcgtcaacgacggactcgactatctggaccagctgccgcaagatgcatccgctttcagtatcgtgctgatgccgttgttcctgcttggttgttctgcgttcgtgcccgagcagcgccgacgcatcacgcagggcttcgagaatctcaaatcctattctaacctccgcaacatcgagcctgctttcaaggtcgtggtgcgggtttgggatattatggatacccggatgcaggatagttgggactgggaaaagatcatacgtgatatgaatatggatttcttgattacttgaatatccttttctcccctaccttcttactcttcttccccttacccttctgataccctgttatttcttatttctacgttatttatttatttgtttctcgttgattattacagtcttggaaggggattcttcgtttgtctcataccatggggacgatgatctcgatgttgtaccatgtggcgttttgatttgatcaccgtgagtgatggtgatgcatatctatatgcatctcggtcgggggatattactattatgtttgcatttgtggtttttttctttttcggcttgcgagcgttggtgcgccgcgaagtctccgtgtcaaaggcgtattctctggctgcattgcatggccgacatgggcgccaagccggctttcctcccgattcaaaaaagggccgagtcggtgttatttctgtggtggatgagtgatgtcgagtgggtgactgaatgatctcatgatggagggcgtttttgtgtctggaggaggcctggtctggccctgctatttgatttggtttagctgattgtgtatattcagatctcccttgggtttctcgcgtggcataataggaattgggtcttcatccttgtacagtatcggatttgtctttctttcagatgtattggggaggatcatccagtctagacctggccttgcatcttctactttaattctttgttcttcactggctgttccgggtacatcctgggctataatgcagtcagattaatgctcttacgtatattgcgggtatgaatacgagttaagacttctaaaggctttggcgtcacatttgtgtttttactcttcgtgaatattagttgaataccattaacatattcgagcgcaatatagtcaaggaggtacctataacagctcctcgcctacgtaaggaccacgttgcggggtgacagaccattgcagaccaatcgcattagaaatcggagactaagaatagtccggggtaggtccgaggcaaggagaattaattttctcagacttacatgactgtgcaggtgaattgcaagggtctgatgtcgaattagccgtcccaagagtcgttttttcttttttggcagaatccggggatcatcctgcagtcatcccataccccatccccatccttgtaactccagtccaccatctgcatagcacatccgaacagggtctcttgtgcggggggatggccgctacatgactcgtgcccaatcctgcgacaccggcaaaatacaccatggaaaaagaccagatcatcaccgaattgagcgcaaagcaactcggtctccctgcagatgtgcaagatactgcatacaatctctctctgcgtgcagtaaacccagtatgcatcaaagtccgcaacttatcgctcgaagtcaacaccaccccgccaatatgggagacctcgccatcacagatctggcagcgcttgcggggtcaggggcctccaagaaccagcaaaacagttctggacaatgtgtccgcctccatgccaagcggtagcctgaccgctataatcggaagcagtggctcgggcaagacctctctacttaacttaatggccaaccgaatgagtctctcccgagcaaacacatgcggaacgacgacttttaacgacaaccccaacatcgcgcacatccgcagcgcctacgtcatgcaggaggatgttctaattccgacgctaacagtccgcgagaccctgcgctactcagcagacctgcgcctcccaccaccaacaactccagctgagcgccacgcaatcgtggaacaggtcatcctggaactaggcctaaaagagtgtgccgacacccgcatcggcacgaccgcccacaagggctgtagtggcggcgagaaaagacgcaccagtatcggcgtgcagcttctagcgaatccctccgtgcttttctgcgatgagcccacaaccggtttggatgctaccagtgcgttccagattatcaggactctcaagcgtctcgctctggatgggaggacggtcgttgtctcaattcatgcgccgcgctctgagatctggagtctgtttgataatgttgttctattagccaggggagcggcggtttacagtggttcggtggaagagtccttggcgcactttgaggagtgtggacatgttcttccgccgttcgtcaacccggcggagtttttgatcgacctcgctgccattgataatcggacggaggagcttgaggctgcttcgaacctccgtgtggaacgactgagggatgtgtggcggttgaaacagactgcagcggatacagaggcagagggcaaaagaggagagcaaacaccgaatgccgagatcggtatatttgagactggagctgtgaagcaggtctcatttcgtcgacaattccgcgttctgacgtctcgcactttcaaaactaccattcgtgacccgatgggtgttgctggtagtcttcttgaagccgttggaatggctgttattaatggctggatcttcctgcagctcgacgaaagtcaggcagggattcgctcgcgcgagggcagtctatacaccgctagcagcttaaatggctatctcattctgctgtacgagacctaccggctgactattgatattcgtttgtttgaccgtgaacgaaacaagggcgtggttagtgtgccggctttccttctcagtcgacgagcagctcggttaccattggaggactttccagtgccgttgattttctctctcatcttctacttcatggtgggataccggttggatccgggacagttctttatcttcttcctcctcaccctgctcacgcactacattgccgtaacatttgctgcagtggccattggtgtagcacggagtttccctgcggctagtctggtggcaaatctatccttcacgttgcaatcctttgcgtgtggatactttgtccagtctaaccagatcccggtctacgtgagatggttgaaatggtgtgcgtatacattctacatctttggggctctgtgtgcaaacgagtttattggacccaatggctcggaactggggcagttctacgcctgtccatattccgataatcccctagaccccgcctgcaagcaatataccgggcgctatatcatggaaagcctaggaatgccgtcgcagtggatctggcggcctattgtggtattaatcgcgtttgccgtttgccactatatcttcgccggtctgttgctccaatataaccgcttcgcgatagatgttgcccaggcacgaaaaaccgaaggagacccaactagtggaaaatccaagctcgctatacgcccaagagaggaggcgcgcaaagtggcaatatcgcttgacaagtacgcgttggatattcgaaagcgacaatacccctgggaaactgcgaaaacactccagattctgagacctattaccgctgagtttcagtcaggcgagctgaacattatcatgggcccatctggaagtggcaaaacatcactgctcaactctatagcccacaggctgcacgggtccgtagggacacaataccgcgtccatggtaacatgctctacaacggcgcggtaccttcagaaagtgtgatccgttcggtgacatcctttgtaacgcaagacgacgacgcactgatgccctcattgaccgttcgagagagtctacgcttcgccgcaggtctacgcctcccaacctggatgtcacgcgaagaaaaagaccgacgcgcagaagagatcctctataaaatgggacttaaggaatgcgccgacaatctcatcggtagcgaactcatcaaaggaatcagcggcggcgaaaagcgacgcgtaacaattgcaatccaaatccttacagaccccaaagtcctcctcctcgacgaaccaacctccggcctcgatgccttcacagcaatgtccataatcgagctccttcacagcctcgccgccgaaggccgcaccctaatccttaccctccaccaatcccgctcagacctcttcacccacttctcccaagtcctcctcctagcccgcgggggctaccccgtctacgcaggtcccggaacacaaatgctcgcgcactttgccgagcagggccacgagtgtccacgcacaaccaacccagcagactttgtcctagatctcatcacggtcgatctccaacaagcagaccgtgaactcgtcacacgcgagcgtgtgcagggtctcatttcctgctggcagagtaaccctctcgagttaaggctagaccggcagacgtcgcagattgccacgcctgcggaactgggcagtctcaagcgccaaatgctgccattccgcgtgacatttcccctggtattgcatcgctccgtggtcaatttctggcgccagccgccactggttatggcgcggtcgatgcagatcccagggatagcgattatcatggcgcttttctttgcgccgctgaagaatgattatgcggctgtgcaatcacgtatggggtttgttcaagagtttgcggcgttgtactttgttggtcagcttactctattgttccccggctctctctgctggatgtcgtttttgtataggcaggctaatatcctaaataggaatgctccaaaatatcgctatttaccccagcgaacgagatgtattctaccgcgaagaagcagacaactgctacacggcatcaacatttatcctcagctacaccgcgatcgaaatccccttcgagatagtctcatcactaatcttcggcgcgttagctgcctttgcagacaacctgcagcgcactgtcacgatgttcctcatcagcgcgttcaactgtttctgcataatcagctgtggcgagtccgtgggaataatgttctgcacgctgttctcgcacgttggcttcgccgtcaatgtgacgtctatcctgctctccatttcgacgatcctcggcggcgtcatgagtcttaatgtcaacaatgtgctgcaggcgctgaaccatctgtcgccgattaagtatgccattgctaatctggcaccgtattccatgcatggccaggtgtttcattgctccgatgcccagaggctcgctaacgggggctgtcctgttgattccggtgagcaggtgcttaagctctataatctggataagaatgggccgatgaatatcatggcgttgggtgtttgtacgatcatatatcgggctgttgcttatgcatttctcaaggctatgaggtcgcataggctcatggaacggtggagggagtggcgggctcagaggaagtctagatagatctggatctcctttttgggtggattttgtctgtttcatacttgagataccctttcacatgtggcttgctttcttttcaaatctatgcgctgcactcgactatatcttgataatgaaagtctgtagaagagaatcagaagatgataaacctatctcatcaacctggacacgtacacatgtctaagatggacatagcttgtattgtgtccctatgtgtaagcaaacttggaaagtgcgagagaaaaggaggagcaacataatactaaagactcaacagcgggtggcctagtggtaacatgcatgtgtaccacgagggaagtgccgaagatcttccactacctggactgttcctgttcgactctggtcgttctcgcctttatctcttttttttctatcctttttatgaagagagataaaccaaaagcctcaaatcacagttgttgcctgaggcattcaagctcatgtagtattgatagcactttcctttctgcctttcctttattcctaggtgcccttttcacaatacactggtaactctgatttatgggccggaatctacgaagaaatgttgcattttgtgttactttgcaaacagacaccccatctcgacaaacgaacccaacaaacgaaccgttccataaagtcaatacttcggttttatgccatgtatataaaccatggatggcctttccatcctattctagtagactttggatctaaaagactataatccagtttgatgttggcaacaatgaaacttgatccagatttacttgatgcctccaaatttgaggtctagacgccttggcttccaaccattacgccaaagccaaaaggccggcgataaaggaactctatgcgattaagtacctttgacaccaaacctagtttgcacaaagataactctaacttgtatgaagctgatactaccaaaggcatggtcacgtggtcatccatacccgccattgagcacgatgtgtacattgcacaacgcaaagagagtacattgactaatatggaaggttgacccggtgtcaactttgacctaccaagatgatgcctaatcaacggtgaagcctgtgactcacagttctacccgagagcacccggtacacccgactaggcaggcagcattgaatccctcgtgaaggccaaatacgaagtagacggttcaatgggaatggagttggcaggggttcacccccaccctgtaacagtggttctagactgcgcatccaagaatcaagccatgccgaggtgaaaaacggcaatcttggcatggggatggaatactaaacgggaaaagagttggagagattaagcataaccggagtccattggcggaaataagcttaataatcggaatcctccaactgccggttagtccccgttggttcccagagatttaaccgaacgttccacggttgacgacgggcggttcaaccggacaaccgatgtcgcccctcaacaggaacagtcctgacagatacggtccgctcaacgtgaatggataactcggcactttgagttatgtacctgccttgagagtttgtgtacctgcctgccatgagttcataccacgtgtacttgtactggattgtacatactacccacggagtacctatgacgaaagtaatataaagcacaccaaaaccgggataaatgacaacgctgtacaacttaaagcgttgttcgagagcgaaaagcgctgatctgagccaaattcatccgacttgattccttggaggaataatatccagcaaatcagatcgaggctccgtcggaaatctccaatcgaaaatctcaacgctacgtggccccgcagtggacacttttaaacgccatccgcccatccgactggcggtgggccctaagatgtggggccagatctacaaatgggcgatttgtgtgttggggttgtcaagggtccctgtctatcactggttctagaacgtgattaattattccttcgcactgagtatgtgttctgtatgtgatcatttggtggattcggggatcttaccggtttgagccttcgctcgtgctctacagcctttttcggggcttttttgcctcccagagaattcttcgtattttgaggattcctatgggttgttctttagggctggttttttcacgtctagtcagatagtttgaaaatgctaaattcgagtagatttctgaagtaaagatcgtatatttcgtgtgtaatcttcaagatctgatgatcatctatctattcacaagtccatctattttctcccccgccatatataactccctgtctatattcaaccattcccattcccattcattccaaggtgggggggtatttcggaaaaccgtaagaaatcatagctcgtgacgagacatcctgccccagcgggaatcaacctgctatagatggggagaagacatgtcgaatcaaccgaacatgttgcataacaaaaaaatcaccaatctcatcatctcaaaagggtatcaccacctggggtgatataaaagaaagaaaaaaatctgccatctagggctagatgtgggtgtgaaaggtatgtataaaagaaaggatgcacagttcaaccggcagaaacaaaagtaaaccagtggacaaatctaggactggccaatgaagagatccagagcagtgtcgatggggcagccgtgggtggcgtggtcatcagtgggctggaggtacgcagcggagcaagcggtgtcaccggccttgcaaatagccgtggggcaagtggaggtctcatcggaaggcacgacggagaagccttggtcggtgaacttgttgctgccggactgcatgtcaatgcaagacatatcccagaagatggtatcgccagcctcggtgtactcgaactggaggacaccgatctgctctggctcgagggccaacttgatagagatgccaccgccgttggggttggtgcgccatgtctcggagtaggtgccaccgttgcccgagatggtctgcatgggaccgacgtcgccggccacggaccaggcgtagacgtcctgggacaggttgttggtgatcgtgacaccgccgccatcacggcggacgatgcccgagcggcggaccatctcctggggaagggccgaaacaatggtggagaagagagcggcaaggccgagggtcttggtgaacatcatcttgaaagataggaagatgtatatagactgatgtagaatggagtgatgtggtctggtcgacagacgtaaagaatgaaacgagagtcaatctcgagactgaagagaatgaataaaaaagagagaatgtactggtagtactttgatagtgaatgtgtttggaagaacagaaatccccgggtgaacgaaggggtttatatagcctctgaactgagagaggcatatagacccaggtacagttgaaagaaaacgtgcaaagccacccatacttcgagccatggatcggttcagggaattgtggggcgatccaaaggcaaaaggcgaaaaggcgaaaaaaataaaaagcagaaattcgagaaaaaaagaaagaaaaaacagaaaaaacagagaaaacacaaaaaagagtggaacgaaaatctcgcctcggcttctttcgagtttcgacagagagagcccagaccggtgagcgaagctttgtatacatccaaaagacatccaaattaagtgcgtacaatcagatgatatcagatatatactacatagttataacattattcgacttatcaactgcataaagtctgcattgctaccagttagggcatcaccgccacagtttatatacgaggtaggccatagtctggggcgtgtcgacatagggacttctgcgtgttcatacaacttaccactataaaattggcccactgatcgcctaaaagctacaactcacaacgtggcaatagtgcccacaaccccccaaaccccacacgtcatgggccgtctgaccgcatccgcggttctaacagatggaaagaattggtttgaaggctcgaaccagcaaaacccatggcaaagaacatggtagaagctcgactgcatggctacacagccacttatcgcacttttttcgccaggaacgactggggatttggagctcgttctgtggttgtggtggccactattacaacctttctatcccatttctcggatactagagaaataatcgtacattagaaaaaattcagaatctagaatgatagtctaaccaaattgaggcaaatatcagcaagcaatgagtgtcgatgagaacccagggtgcacactgtacggagtacttcaacatcataatgtggcaagtaggacattaccaagcagacaactatattgcccaatatacaacatacgcagtcttctaaagaatgtctgtcaaccgagccaatcataatatctcctatagattattaccacaattaccaattcgaccggcctggctccattctcgatgccaatgctcgataattcttatacaaactaaatcctactaggtaagtgggagctgactctccacagttcagaccctcttacaagaaaatcctacaacatataaactttatgtgttggagtatgtagtcctggacccctgtgtcaaagaatctaagccaatgatatctttatcaacaccccaccagacgcctctgacgttgatctagtgcccatacaaccgactgtgcctggcgatcgagtctggattcttttggcaaaagcatgttctacatcctacattgtacataatacggactactaactctatgataaagttttcactaaaaggttctgaattagggcttaagtttttgaattaatcaaatccgacctgagttaggcaatgggatgtatgaccatggcatttatcgccatgtgcatagagattatgacttgaagaactctcaataataaaagaaaactaatcctggtatacacaaaggatttctcccatctcccaattattctgtttgttttttttttccgaacttaaccctcgatcactgcccctgtaagccactatagtccgcatcggagttccccgtgggccctcccagtccgcgaggaacaagctggacccctacccccatcaaccccaccaattaacccccctccacttcccttgtttgcagcttacctgcagtctagatccgggaatcaaccggtaagaaacagtgcctggaatgaaaggagggatggaagatcccggatcaaatatctaccaatacggagcgcgcatggccgacagactagccaatgcgccctcgctgccatcctccttcttccggtgacctgccagctccaagttaatctggcgatggatatgcaccagccagtcaacgtagctctgagcctcgttattccggtcctccagcaggagtcgggcgaactcgtattctgctccgtccaggccttgccgggccagttggatcgttacggacttggatccgcgcaccgtcgacaaatactgcagcagattacgcacctgtgcgttcaagtgtgtctcgagcacaggcagggacgaagtgttggggttcaggccctggatggagtcgtggcccggcccgaataggtcttccagtaaattgggtgagacctgcgcgtgcagccaaaggatgactgcctgaccgttgtccacgatgtagacaccaccttcttcgatacgggagaagctggctcgcagggagggcgggatttggagctgtccctgctcgttcgcaaatccatcttccggctgcatgttgtgcacggggataatgcgagggtagaggtacaacgccatttccgtgcagcccattgaccggatcatgcgcatatcatgcacccgccggtctgatgactcggggccggccttgaatgctctcgatttgaccaagctgagcatgtacatcgagaactccttcagattctccggtagaactagctggccgggagggtgcgagccggagaagatcttgcggtatccgctgaaaatatcgactgtcttctctgagatattggctcggatgtccttgaggttcttgtccagggtcttcgaagcggctatgatggtatcagtatacacggtcaacattttctaatagatcgtccagcttaccctctttggcaataaccgagactacggcatcctggtcgacaaacttcatcgtctccaggcctccttcattcactgccgccacaacattgatacatcggacacggcgttgaccgtctgcggaagtgtaaagcaacgcggcctggaagtgcgcatctagcttgggatcaagtttaccgtcgtagctgaagagcacgccgacagccttgtcggcatcgacaccggcaatctccagatcagcgccgagtgtgtgctggacaaagtttccgtggtaggcggacacttgaagtccattggagcatcgaactttcatcagtgtttgatagcccgtctcacgagtgacggcatgagcgatttcatgtcggagcttgaggagatcgcgcggggcatggaaattagggtagaagaaggtctcgcctccggtgagactagagacatgtcctatgcaccatattagttggctctttgtatagggctgaatgacgctttcaacataccaattgttgccacatcgaggtatgtgccaccaggggctgccacgaacaaatccatgcccacaccggcttcagccaacttgcttgccgtcttcttccaggctgggttttccgtggtgaaaagtttccgttccgcatccgttccataaactttaggatcttctctgatagccaagtgtcccgggccgtaggtaggtaagctagccaccgcgcagacgatcttgccacctgtagcctgcagtgcggagagcgccgagttcaatgtcggcagcaaagctgaatcggggtttttgatagaagagaaaattttgggtatccgactgagaagagaagtgatcacagacctaaatatcgttagtgatccgtaggagaccagaactataagatcgcatacttggactcatatgggtccacaaagagaccttcgctcagcggtacaaatggctcatccaaatcggtcatgaccatcatctgcgcttgatccaatgccgcctgcgaacgtgttaatagaagaagggtatcgcagagtgtggaacacatacggacaggttgtagaagtgcacctccttatcatacgtaacaatgccgacctttgccccaacaggtaattttcgtggtaattcctcgccttcggcgccctctgatgcttcattatcactaccgtacagagcatccttgatacctgcgcaaacacccttgaggaaacctcgatgaaccgactctctgctgacatcaattaggaagagggtttgaaggcccaccggctccttgttccagtattccttcgggaccgtaaactccacggttcccaccagtaattcaggacgttgcatgcgatccacacgtccaccggaagggtccagcggcgcaaagtattcgggaggcgtatcattcgggaacgtgcacatattacagacgaacttgctgccgccagatcggaaggacatgaatgggttgatatatgttcggcatcgtcggcatcgtgggggaccaacatccccgaagtccagcacggggatcggttgttcgccgggatctagaggcgcgagaggctgcaagatcatacccaatggcaagccggtcgaggcaaggaagtcagaggcggaagggatgttattgagcgttaatcgagcgtatttaggagaggagttgccttggtcctgagccacgaacgggatcgctgctggtggggggaggtgttgatccattgtcgggtagacatggttgaaatagtaccgagcgggtaggtcgcgcgatcgcgggatgctaggaatatgctctgggtcaattcgccctgaagtaggcacagaacctgcaccactcgtcataccaggtatgtcggcgacagactgcccagatactaaccccaccgccggggaaactggtcgttcagcatattggttcaagcctgtgtttaggaactgcgattgttgttgttgctgctgtggctgctgcaagcctccttgatccatgccggtattaaattcttgcgcgggggttgctgcacccccgatgtcgtggtgagcatgacggtgcttcttccggtgtgtcctggcccccgtatctgctgcaattcctagcccgctcatctgggaggctaagcctgccataccaggatctcctgctgtccccattgcttgttgtggtgcattgtacgcaatgccgggactcgccaaattcggttgttgtggtgagccgtaggcgggccactgattcggcgctgggttggcgtaaggcgctcctggttgtggagacgcggtgctgggaggatacccagcttgatattgtgcagggggagcctgagccatgtactgcggattggaggggtcttcgccggatccctgacccattgtgttatacattgaagggtcggccatggtggatcatgccgcggaggtgtgaggtgagagaggtcacacaagggtgggattgagaaatggagagataatctcaacaaatcatcacgtatggaacagtattagagaataacgaataacaagagcttatgttgacgatataccgaatagaccacctaaactcactcggatttacgtacttccgaggatattcacgtggggccttatcgttgtactttgtgacttgtatttcctcttcctcttccttaaggtattatagaagacatcctcaaatgaaattgtcatcctttcttaataaaatctaactagtatgacccgctattcgtcactctgcataactccgtgttagcgaccagccggagaccatcccactctttgatggctccgaagccatacatatgtcaacatcgtctccagggctttgtcctcgtctcagcgccttaggcaaagcaattcatccttgtatggcttggccgtttttcgaggtccaatttacgcttatcatattctctccaatcacgtcagatctctaatcctggctccggctcaagctccttaggatacatctttttctggcgtgttcgactcaccgtacttttcccgtgcttgatggctcccctctagtccggtttcctgaaccgacgacccctgctctttacaccgtagatataatacaagacttctgtaagttccggcatttctcttttctttttcccaccttatctttgcccctcaagctccttgcatacatatatatgcattggtcgtatacctactccttatcatggacctgaccgcaaaaccagacccggatcgcaaacatcagacagaaggagtagatacaccagcccctcttcaacctacaatggctactattcacgatgatgatgagctgttgttggcccgcattggctataaacaggtattggcgcccaacacctggtggggatcatagcggggcacaatctgataacaattatcctgaactaggagttacgacgagagttctccaaatggtcgactgtctcatatgccatctctattcttggagtccttggctccgtgccggcgacattcggtgcgccgttgtcagctggcggtccagcaacagctgtatggtgttggttgatcggttcatgcatggctatgtgcattggaagctccgtggcagagttagtatcggcatatcccacagccggagggatgtactttgtcacaaagcaggtcgtgcctcccgatcaggtcccaattttctcctggatccagggctggtgtaacctccttggacagaccgcaggagtctccagtgtggcatacacggtcagtcaaatgttgctggcctgtgtcagtatgaattcggatcttgtagatggcaagtattcgtatgcaccgtaagtcaactagcccgaatcgctacgtttctaagctgatatattcaaggacggcgctggagaccgttctagtatcaatcgcagttctatgtattcttggggtgatttgttcgttgactacgaaatcactacatcgaattatcctatggtttgctcccataaacagtgtgtatcaagagaacttcgtcgtctgacttgtactaatgaattcacagttggggcgactatctgtatatgcattgcgctgcttactcttacccctaatttacagccagcctcttgggtcttcggtcatttcactgatggctcaggatggggctcaaaagtcttttcttttttcctgggctttttatctgttgcatggacaatgaccgactacgatggaacgacacagtatgcgactctgaaattctctattaattcatattctaacctttcatctttattatagtatgtctgaagaaacccatgatgccgccgtgcgaggaccagttgctatccagacagccgtcttggtatccggggcactcgggtggctcctaaccgtctcaatgtgtttttgtttgaccgatttcgagggaattctaacctcccctaccggtcttcccgcagcccagatcttcctcaatgccggtgggaaacgaggtggcacagttatgtgggcatttgccattttggtccaattcttcacaggctgttcagctatgttagcagatacgagaatggcctatgcctttgcgcgagacgatgcgcttccattttcaaagtaggattttcttacctttgcacccgattgaaactccgcactgatacaatataggtacctttccaaggtcaatcctcggactcataccccagtcaatgcagtgtggttcgtggttttcttcagcgtaggcttgaactgcatcgctatcggctccacgcaaacggcaaccgcaatattcaacatcactgcccctgcactagacatctcttacgtgtctgtcattctcgcccaccagctctataaatcgaaggtcaaattcatcgagggcccttttacgctgggcagatggggtacttctattaactatattgctgttgtctgggtcttgttcatcagtacaattcttttcttcccgccacagcttcctgtgacacccgcaaatatgtaaggcgcttgaacccggtttatattcaggtatgaaaaggtatactaacatgactctacctaggaattacgccatctgtgttggcggctttattgccgcttttgctttgatatggtggtgggttgcggctcgagggtaagaaacatctaaaattaacttatacttccagcatcattcaggtggatactgacatggcctcctttatttctgcagaaagtacactggtcctcaaactaatgatatcatacgagaaattcccaccgaggacgatggcgacgattccgaagagtcaggcgagatcactgtttagatgacatattcattccttacgcacaacgacaacttgcgagttcagttttctagattatggattagatatatattatgttcatgtttgtttgaagttttaggcattttagaaatgggtcatgttggtttcgggttaaattgtgtgtcgatgataatgttgtttttgaatataatactacctgtgacattgacttgagcaaaccagtagaagaaaacctgtttgattatgaatatcttgatttcggaagaaagaagtggctatgaatgctttgttgaccatgaagttatacaccggaaaaagatagaaatacatgtcacgtgtagtcttagctgcctgcaacaacagccaggccctcgtagattttccttttgacagcaaggaagctccctattccacgaccaccaggccgagctagtgaagactgtgccgttgcttcgatttcaatcttgcccgttccagatttgcgcacagctacggacttgtcaatgagaagcgttccctcgcctcggaactcggctgtgtgaccagcggattgcatcagcttgcgaagatcagccaatcgcaggtcaccgacatgaagagggcgagccatagacctggttcccgcggccatgctagctgggagagtgtcaagtaaaggatagacttctaccttctcgattattttggtgtctgcttgttccaatgtcggggcgacggcggaagaggctgcttcgtccttcagctgcttcaccttcttgcctgatgtttcggcttccccgatctcagcaggctctggccctctcaactgtgccatgagagcaacgacgccgaggctgcggacgtgttgccaattcaagcgtcgaacgagcgtgttgctcagcttgaccatccaggcatttgtatcaacacttgcatcgacgacttcgccgttcgcaggagtgaagataatggcagccgagtcaaacgcagggtcagaaaccgtggcgccgaccttgactgtcagcagtttctggcattcggctgccaatgctgacgtctcttctttcatgctaccaaccaggatcaatttttgaggttggatcagtggaattaacatctccaagctgcgcttgtcgtgcaagcccatgaagtcgatatatgcaatcctagcgttgatagtgatggtctgggtatggtaaacaaccttcgcaggaccttcgaaggactggccttctacttcgtcctcggactctgcagctacatcggcgtcttcgtcatcagaggcaaggctgagatcatcatcttcaatcttcttgccatcaatgtgaggacgcttccgtccttctgcaccgccagacaacttgcgtccatttgggccggctgcatcatcccatcgtcgtttttggcccagcttagtctcggcgtcggtacgccgttgttgcatatcaatctcttcacgttcttcggctcggagatactcttctggacgaatgaattctccatattcgtctcccttctttcttggtgccacgtaaggaaacatgcgctcgcggcccttcttgccacgaacgtcgtaatcataaacgttctttcgacgaagaaggatgttgatgcccaagtcttcgtcactgacggcaagtttgcttcgagtagcgtgtgcaagtgaggccgaaaagttcagtgcgcgaccttgctgttcaggatccgagtcttcagaagaggtagagctcgatccgtcatctagagcatccgcagcagtttcgagagtttcttggccaagtgtttgagatgtgtcttcaagttggcgtttggtcgcgagatactgctggtatattagatgttccccggtatcgagaggggctcgctgcacatctgtccaagacaattctcgtccaccgctgtggacttgttcgatgtgttcgccgtctgatgctttttctagagccacaccatctcttcgctcctcgtaccactgccaaatcatacttccaatggttgccgaactctgtgatggtttcgattcttgagtcgtcatatccttgcggaaggactccgtcagcaataacagattgttgggtccttcggccacttgtcgaagcgcatcctttgagaagccccagtccattgatgtattggacgcaaggattaccttaggtccaggctctgccaggagcttctcaagacgcttcttgcgctcaatgatcttgagatgtttgaaagtgaatggcccaccccctttgttagagctcttgtcctgtccccccgtcctttgcccgttcgtgacgtctgtgctttccgccgcttcaaattcgcgaacaatgttctcgtccatccactccagcatgcttcgggcgagtcggattgtgttcgtaacctttttgccagccagatacaacccggccccttgaagaacatcctctttgtcgccattcgcggcatcgcgccaagaatgttctagtgcgtaagctagttcaagaacccgcgcacttgtgtctgtagggatgagaactgttccacctttcgcaaggcaacttcggatcatgtcgaggaggagatcgtctcgctttttccgacctcccgaaggtgccagcttatcgcctcctgttgtactacagatcaaggccgtgggtttacgtaactgttcaatgacttctgttccactggcaccagagccaccaaaccacgcagcacccgcgaccacactctcacgagcttggttccaatccattgcatagacaatggattccagcccatgctgaatatgccatatcgttccaccgacggtgtgaccggcattgtaggctgtgagagtgagcccgttcaacggcggggagaaaggcgatgggagaggttggtgcggttgggaatatttgagtggctgaatgagagagaagtatcgagatatatcctccgctgtcggcgattgaagaagtattcgacttgcgctgccagtggcctcggtgtctccgcctgacacagtcgcagatcctgctgacgatgcgcccggctctgagacagaagccttcggtagaaatgtggcagcgagcggagcggaggcatagaggtcttgtaggagggtacgaccgaaagcgatcacaggattcgttgcatagattgggatttgcgtgaagagggggaatgttcggcagcaatggactagagcgccaatgtgggcgggtgtggcgtgtgtcaagagaatgagagaaagcgtaggaatatgcctgattatggtattagcccatctgaattcaaaaaccttggaaggtaacccagatcgcatgctcacttctcaagttccgccaaatcaagggtattaaacttatcatcccagccaacatccactaggattttgatgcctccatcgagctccaagatagactgttgtgcctttgaagatgacgactgggcgccaaggaggggagtgaacgtgaacatcttgagaatctgccgttactgacggcaaacctagcagcgcgattgttctggaccagggatgcggcgacagatcagtcacgatcaatgaggtaatgcctcgatgtatttggtcaattccaagattgatccattatcccatatcccagggtgtcaaatcgatccgactttcgcgaacaaagacaaaagagataccaggcgacgggcgagcttgtttgttcggtttgcacgtgacgtctagcaatataaagccgaactattgtataggtcaagtccttccctcgacacctttcaagggatttttttcaaacttacatttcacctagccgtggatagtttggtattgtatactggctcctggtgtttatccgagtttcgtgtaatcaagcgttgccttgcgattatgccatattctacaaccgggcttgaacatgcaactatgttggacaatatacatgcttcgctccagactagtatcgtaaaaatgtaatgctcaccagaagaatgatgaaggtcagataaaaatatgaaagaaactaataaatttgaaggaaagaggcataggcatcccaaactccgattctatataaatccgattaaaccacaacacccatagaaacaaacttcactaccaaactatggagagaaggtacacaacaggtttatctaaaggaagaccactgggctgaactgactgactgctctgctgcagatgctggtcttggcctccttttacctcgccctttgctccgtctttttgatctcaagagctttgtgcgcgccgcaggcgtaggaatttccccaatctaatagaatatggtcagcatggctcctcaaaaacctaatcaatggattagggcacttactggatcctgccattgactgaaaggccggttcctttcagcccaagggggtagcgtagcatcgacttcgggtttgatctcatggcccaccaattcctcccctgcccagactctggctcggcgaacagcaatagggtcagggaaatgcctcgccctccgcattgggtcattgaggtatattcttatctgttctaggaacctatcttgcagattaggcggaatctcaggactaggtgcgtccgcctgcggtgttgcacccgcctggtttcctatgggtttcttcagtgccaccggcggcctgtctgatattttctctgctgcagctgctcgcatttcgtcccgtttgtcttgttctgctcgagcaaatgacatgactttatccaccgtgatctcagccgctgttttccttcgaaccgcggatggtgatggtattgatggtgactccatccgtattcgtttacttgattttggagcccctattatttcaagttctctttttctcgcctctttctgtgcgtcttccagtgagagctgtgctcggcgctttcgctttgacgcttcgcgatgtccaactccgcctagcctctcaacttgaacagaacattagcataattcactagggtgacagctaaacatattgactcacaatttttttgcttcttcctataataccgttcaatctgcccagggctgaatagcccatcgtgggatactggggagaggttattcgtcgattgatcgctattatcgtcagcggtgttgaccttgccaggctcactggtcttggaagaagcgctgacctcgctgttagagccggagccagacaagaggctatcaggtgattgctctcgagagtctcgagctgagtgaggctcagtctgaacgtcatcgccgtcgccaaagattgaaccgtcttccgagattgtaactagagcctatcagtcagcgtattgtccgaataagtctgtagtatgcagcatgtaatgtcaaagtggttaatcctcttccccagaaacgcgacaaccagtcgtcttgggtatgactgcttctatgtatcgtgccccacagtgtagttgacactcgcacaccttccgaagggtctattgaaaaggcaaacgaacacgagaatgaaattcgagtcaaactaagcacatttgtactcaccacatgaaaccttttcatcatttcgaaaaggcgcaggggctgccggttccgaataagtaccctctggatcttgcgacttcctgggctcggctgtgtgactttcttcgctgccctgtttgccgccccgttcgctttccgggtccggactggcagagcgcgaggcagtcggccattcttccgatcttggtcgattgtagatattggacgccacggcatgcggatacggtcgcgccatgcgatcgtcacgcggtcggactgccatgcttggacgatcataattagggaagtaaaaggccgcattacttgactttcgactggattgctcggaggttcctgtcgcaaagtgccttgtgatgggcactggcggcagaactgggtcaatggccacagccttgagcaaagggccctgggctagggaatcatagatctgctctcggagctctgtatgggtgagagtatattcgaggcacaggtacgcaagttcgtaaagagctgggtattctatcccggtccagttcttgaagtcaccttcttcaaaggtccactgcaattctccgaagtccctcgcaccaccagttctcccggaactggcttttgaggcatgttgtttggaagggacttttatgtttgcgctgttttcgctttgaatgatcacccaacgaggctgtggtgcagcgcctccaatatagatgggtggtagaggtccgtgatatttgtcctccacaccttctgggacacgaagtttctccatgtacgcccatttcccaatttttgaagctgggcgtttgaatgtgggccgaccgatttccacattaggaaccagagtcttaaccttgcgtcttttggcctgtggttcatagttgtcttcttcactttcttcgtcctcgtcttcgtgatattgttttgttgaagccttcacggtagctgcgctaacactgctctttgtagccttcgccttcttggcggttttggtggctttgatggccttggtcttcgcagcagttgtacgctttgtgccctttgtgccattcttggtcttggcaacctttgagattttcgctgcagccttctttgcatccttctcagccttagctgcagccctctcggcctccttttcagccttcatcttggcgactttcgcggttttgacagcttttgcggccttggaaggcttagccagtagcggctgagcctttggacgagtacccgcagtcgttgatcgtgttgcaaccataatttgagttgggtgatggtcttcaggtttgatttggtttgttagttggagaatgtaaattggtaacgtcgggacgatacctattgtttgttggtgttgttacgataatgatgattgatctgatgacaaaagatttgagtcaagaaaattgtggtcttgttggttaagggaaaatttggatatgttgactctatattaatagaagacagagacgagtcaccattcgtgccaatagacaaagcacgagcagggacgaagaaatctgcagctagttaccagcacaaagaaaaccaaaaatatattttcgagccctcttctttgttgactgcacccagcttgttatcaatacgccgatggccttgacaaagagcgcttcaggtcaatcctgatacgaagttccttttttgcaatcgaaagtaagtttaggtcagattattcagggttgataacagctgtattgcaacacctggacaggattataatttttatcactgttcgttgctgtgttcatttcgacacaaagtttcgagggactgtagaagaccaaaatcagttcgtgaggatggaatcaaaggaagtcaatagaacagaccataaacgtaacccagagaaaccgggcagttcgaaaaagaaaaaaaaagaaagagagaaagaaaccaagagtacttcgagggcgcatgagaaacaatgaacaaggaccgggatcatagcagtatcaaaaacaaaataaacacatcaaagagagcaattctcagaagatcagtcccagaaacaaaacacctcgtttcgggctcataatgggctgatctgatattgctgatcatctcgataaacttgcacccaccatgcttattccagagaggtccggatttttgtatttgaaatccaacgaagtaatatcgacatgtctcccgacaaactgggaaattcggaattgcgaagaggtgggcgagttagggcttgattccaagcggggatacccaaccagccacttccactaggaagcaaagctgaaaggcaagatcgaatctggttcatgtccagatttggcaatggcccgcctcatttcctatggtgaaaatgcctcttaaacaaagcgactcgtatttccccattgctgggcctgacaccagaacgatacaaagagatttgaggatgggtgagtccgtgcaagcatgaaggaaaagcgtaatcagcaacggcggatggaaaaaaattgcgcaggcgtgctagtctgctgtcattgacctatcctgtttcagattatctctgctcgtagccaaaactattattagcgaacgcctatcacgggacaaaggccatctcaaagatcctgtcatatacaccatctgagacaataccctaaatttcggtccctcggatcgtgcaatgtacgaacgagtatgtagaagaaggccgaggagcacgagctagaagtgaatactgctaaaataaaatcataaacagaaagtcctctcatcattcaagtacactaggtatattggcagccccaaagatagtgggatggctgccttgttcggtccttaattatgtcacgatatgggcagactcatcgaaagtaatcccttcaagcgaacttttgcgcaatgaagacccaggcagactgtctattgccagtacctgggttcatcgaaaacatggtagcggtgtccgcgaactccctcgccgcggaacaaggcagggaagcggcggccaacggggaccatctcctctgggatacgcatctcattttcgggttcgggctcgccgatgacgaactttccaacctagatcacgaaacagtcagaaactaagcacgcgtaggagaagaaataaagagagagcatcacttacctggatctccgtatcagtgatggtatcacgactaattctggcgtagccagtgcgatgcagcttcttgaaaagaaggtactcgcaccatctatcccagtcggtagggtcaatatccttcatttggctgcgctcgctcacataggtgttgtagttgccctcgagcggcttggtgacgaggtaacttaataggatcaggggacgtggggaatcacccatcaacttcgacagatactcgctctgcaagcggcggtcctcagggtcttcttcctgtccggagtggaacacaacaatatcaaccatctcgccgtacatgtcgagtgtggcgtggattgcaggtgccagctcacccacaggcgaggggagaaggtggtgcgtagagttgacaatggggaatttagacagcaaggcagagccccaggtgtgcttgtttggaccggggccgaagtcagtgtagtagccaaggtcctcagcgatgaactgagtaacgtccttgttgcccatgatgatacgctgattgtcggattcgaggaaaccaatgacatccagctcaagctcaccgatgacatcgcgcatgcgccgctcagcggaccacatgttgttgtcgaggccgaagtggacagtccagataccagcagtcacaaccttgtcttccttgtgataaggtgtgtagtcattggtcgggaagcggaggtaggcaatagacacggaaagcagttgcagcacagcaagaacgtagatatagtacgatcgctgtctcctgctattggggttgacaggcttgtgaggcttgcgggagcgagtagagttcgaggtcgccgcagagaaaacacccgcaccaatggacagcattgtagtggtcatgagccagtcagtgtgctcacgaaggaatggaccgcctggaacgaaggcataggcgacaacccaaacgtggaagagcaaaagaaccacataaacaaggaagccgatgccgaaagtgctcgcaggagagtgagcaacgctggatacaatcagaaccggggcaacggccatggtatagaacgcaagaatgagggcaccgtagaatccagtccagtggtggtagcaagtaagaagagcagcaccaatggaaccgacaccgtaggcagtccagcttccagcaattctgggatggaaaatgccgtacacaaggccagcccccattgcgaagatcgtcaaagcaccgtgaggagctgcgatcggtccgcgcactgggtatccgtcccagacccatgagatcatggtactggaatcagtcaaaagcgacacaatggtgaacatcagaccgccaaatccaacaccagcaagaatggacgagcccttcttgccacctgctggcaagtaatcaccgccgctcgtgtttgaacctctctgggacctcaaaaccgcgaacaaagcaatgaagattccaattttattccagccaccattctcggcgtgaacaattggccaaagggggttgttggtcttgcatgcaaacttggcaactacagacaaaaccagaccgattccccaagccatgatacgggcctcgagacgaggagcgttgtgccgttcggaaaagaagctggcggtccatgctgcacacgtagtagaaagagcgaatccagtcacaaagaggcggttggcaggatcctggaacttatatccgagaagaccaacgagcgaaaccaggtgaagaaggcggaggttcttcacagctgcatatcgcaaagatgggatgacgtagaacaacggggatgcgcagcaaacaatggcaacctcgtaaccagagatacccatgtgccaaagagggaagtctatcaatatcagacaagtccatatagagaggaatatgtgtcacttacaccagacaaggacaggcagaccagtcacgatggtccagaaaacaaactacagtccattgtcagtaacacaaaagaccaatgatcgaccggtataatttaccccattgtagacatccgcggcggcatcaatgatctcggtccagaagaatccctcgccaaaggtgttgcccaccggctttcccttcctacgtatgtggttaatttccgggatggttgtagttggttatgggattgtacacactctttctccaagacagaatctgcagtcgtttccaattgcctaatgaacacaaacttagacaatgtctttttttttcaaaaccaatatagcctttggcactatacatttgatgcgggcagtgtcattttggaagccacggtacataccctctgctaacacccttaacatccctcaccactagttcgaagcactcaaagtcaagagctgtgacagcatcaaaaccgacatcgaacaggattagggaccattcaaagaaggcatatttggtgtaggctaaaggtttgactgattagcatgcgataaaccccagctgaatgctcacgaagacaagtactcaccaccgggaaccttgtggaccttgtgctgaatgaaatagtaaatcagtggaaccaaagttccaaagaacaaactggccaagattttgcggtacttgacggcgcggcggttgttcgggctgagtgcaaggcaacccagggtccacggcaaggtggccaccaagtacgagatcatgaaaatgtcatgccagtcgtgatcatcggtagatgtaacataggtccaaccaccacatgtcaatgtccggaaaatgcccacgccggcaaccaacttaggtaaggtcgagttcgggcgcgaagtgaggatgtaccacaggaagacaagcgcgaagcgaggaccggaggtaatagcaatgaagacctggaaaaaggaccgctcgggataacggtcaccgatggtcgcagacacggaggggaaccattcaatagggtagccgtagtgttcattctggacgatcttgtggtagtgcaaagcaatgccgacaatcaacgcgctgatgaacgctgcatatgcgaaaaccgtgtgagtccatgcaacccatttgccgttgatctgcaaagatatcaagtcagtggcgtttctagatccgcatcagatggcgcttcagcacttacggcgaccacggcatctccgtccttgtatcggggagccatggcggcacagaggtaaaggcaatctctgcacctatatgattaaaaaaaaaaagctaaaattgagaaagaaaagagcgtcggaaaaagaacgaaaggaagaacggcttcaacaagatgccacgagcgaacggcccctgagagaaatcggatgaaaacaacgcccggatgcctcggtggttctgagcgtcgtttacgctaacccaatgcggctaagcgcaccctggggctgatcggtgttttttcaatgcgggatgccgactatttttttttaacatcttgagtgaacagcaatcatgtccgccgcaacagataaggctcgatttttcctcgagaagtcagtgcctgagctcaaggaatatgagcgcaagaagattttcaccaaggtaagcctgcgaggcggaattcttccattagaataacagctaatgataactaggatgaaatctcctcaatcgttagaaagcgatctgattttgaacacaagctcaacgcgcgcggggcgcagccagtggactttgtgcgctatgctgaatacgaaatgaacctcgatgtgctgcgaaagaagcgggtgaagcgacttggaattcggtcggcagggttcaacggccagcgacgcatcttcttcgttctcgaccgagctacacgcaagttccacggcgatatcaacctctgggtccagtatatcgaatatgctcgcaaacaaaaggcacacaagaagcttctcacgattttcaccgatgctctgcgactacaccctaccagcgccgacttatgggtttatgccgctaagcacgtcctcgatgaccacggagatatgacacaagctcggagttacatgcagcgcggtttacggttctgcaagagcgcgagggcaatttggattcaatatgcaaagctggaactgatttacatcgcaaagctggtcgctcgccaacggattctcggtcttgatgaggagagccagaagcccaaggccatccaagaagcagaaattgacgacactgatgccgacatgattgcgctcccatcactcacagccgaggacatcaacccgagcacaggagtggacggagaagtagaccaggttgcgctgcaaaacctgaactccacgcccgctctgagcggtgctatcccgctcgccatctttgataccgccacgaagcatttcgaccacgatgatcggttcggtcaggagttcttcgacatggcttgggaattcggggatgtgccttgccttcgcaagattttggaacatgtgattgagacgatgcaggccaacaagccttccagcccacggacgcagatttgctacattaagttcccgaccgctggaatcccttccacttcggccgaattcccgcgggcgcttggtacttcgcttgcccgcctcagggagtatcccatgggcaaggatctcgcacaccaagtgatcaactggctccaacccgtccaggcaacaaaggatctggatccttcgttgcagaaggttattgcggttaccatccgcaatgcggagcgcgcggcacaggagtagtatacatatagcatacccaagtattgtacttagcacttaggcgttgatcggatattatcaaaattcagggtccatggcgaacttttccctttactaccatttgcatgatcattatcaatcatcgtatttgcttccccggcgactgcttttcttgtcgctgtgctgtttcttgtctttaatccgaccctcattttgagccctctgcctgtgttttccttttgtcagatgtgctcgatcgcttccatgaaaaaagtgcacgtacaatttttgcacgcgatttctttgctcttgggatgtttccccggggatcacctccttagccgagctctgcaatagctgatagagcttgtcaaagcaggattccacgttgctagactgtttccgctcctcgtccgactggataattagacattgggctctttcggcggcatatcgggaagtgcgtagtggacggtgtatcagacggggaaccaagggcagcaaggcgtccaatgggactttcaaggtggccttggagttgaccctatttccctcatctcccaattagcatcaatccagtactggtattgctgtacaagtggggacactgacttgttcacattttgcccgcccggcccgctggaccgactgaaagagagctcgcagatgttgcgggggatggtcttggaattgagggttttaagccaatccctggctagttgtacatcctgttcggcttgagatgcaaaccttctcaagggtagtgcccgaaggcagggtatacgccattggcaatacatgagagaggcagtccgtggccccggggagaggtggagtgtctacccttggaaaacgaacggctgtttctcgcctggtctagccccgcttagcgctttagcgtacgtaacaaaagcttttattttgactgggatgatgatttagattgattagagtaattggagtagttggagtggttggttggaatggatgatgtagtgatatgtatatgtgatgtagtatagctacattaaagtacatcccattcctatactccatacaaaattcctatggaatatcctccttcttatcagaatctaaatcaattaaaacaagatccattaacttgccctcgtgatactagaatagacatcccaaatacagaagcccaacgcctccggttgctcacctgacctacattttttttccatatttccacttcgcacctgtagaaaccccacctattccctattccttcttcatcgcctattttttctttctttctactcttcccctttcccttctgggtgaggtttgtgaaatacgacccatctttttcccatcgccccaccttagcttgcgattgcgaaaattcctaggaccctcttattcacccatctcgccccgacacttcctctccgtagatgaaaccaccactttctcgaagtctacatgacgcccagtccccccgatgaagcgcttcactttcgcggaaagactctgaccccggaaagccctcgacccctacacatcccagagccatccaatatcccagttttagagaaccaaatggaccccgtcttcaacgatacctccacctatgaacgctcggtgtataaacaggccccgcaaacacacgatggatggttgcacggaggatcaaaagatggtcaggggggaccgagtcagacccaaggtgctggtagttttcatggctcgcagccgaatcgtggggtgcagaatgaaatgattgcttctgcatactattctcctcccaacccagcgtccgggtcggaaaacaccggccatctgggctctggtctttctcctcccgattccacttattcccacactgctccggttgctccggtatcccaaggctttgccactgggagcgaagtagaccctgcccacaaaccggagcagtcaaggatgtcggaccgcctaattgctgaggagcgtgtgggacataaggcgggaggtgtcaatttccagcaactcctcgacaacctttctcgccccaaccctggtgcaactattcccgtcacttcttcggctgggcactcgtctctccaccaagcgcccgctggcgagtccctcaaatcccagggcatccccgcccaccctcaagcccaaagccacgattctgtccaggcccattatatgccaaatggcgaggtggcatatcaccaacttccgtctgcccatgatgctgctgccactgcatcgcctgcctactcagcccaacctagtaatacccaagcccaaacccagcctcagccgattgacacttcttcttctggaggtgcctcggtcaatctacctcctcctattgccactttcccgcaacccccatctacctgtgccgaacctcatggctccttgcaagagccttctgtagcctccaagaaaggccgtgctgaaaagcggtccatcaagcccgctgacgatgattcgccatggggtccagagattcaaaagaaatatgacgagttcctgcacgatgagcggatctatgtgacggaaggtctttgggatcggttccccgtgggctccaggctgtttgttggtcagtattgtttccgcttatgtctactcttcgtcgatctaacattctcatcatgtgcaggaaacctccctaccgaaagagtcaccaagcgagacatgttccatatcttccatgattacggcaaactagctcagatatcgatcaagcaggcgtacggcttcatacagtttctggaggcgagttcttgccatgaggctctcagcaacgaacagggagccgtcgtgcggggcaggaagatacgtgagttactggagccatagctcaacaattcttctctcaaggaaagacctaaccgttctcagatcttgaaatctcaaagcctcagcgatcgacgcggcccgctcaagcatccgaagattcccgtgcaccgccaccacgtcggtcccgatcaccggagttcaaccgtgcccctcctgggcgaactaacgcccgggcccccgtcgatcgatacgaccgatctaagccatatgaaacaaatcgggttccattcagcgatttccgggatgagccctctcaccgcagtcgacgtgacgattatcgcccgccgcgctcaccatcccctcgaccatttcgggggtctagagatgggtatcggtcgcgcgatagaactccagaaagatttgatcgccgcgagcgaaggcgctcccgctctccacgttcttctcgctctccttattccagagatcgacgttaccgcagcatcagcccccggccacgtgggatctatgaaggtgaggcggatttaccggtgcctcgacgagctcagcgagatgtaccagaggtgcagctcctcgtgctggaggaactcgataggttagttgaatcccttgatgtctgtttagacaaagtcgctgacattgcgaagaaacttcgttcttcatgtagagaacgctttccgcaaccgtggattacgagtcgatgtcctggtgcttggtccacggatccctcttggcgccgctgtgcatcgtcagtttattgaaggcgttcttgcggttgtccgcctctctcgtccgaatcaagtctctcgaaagattcctctgcaactatttgatcgaaccgctggattagataacgtccgcttccttggtaagcgcattctgtgttcgcctcttcatcgacgccttgctcatctttctttcccatatagattaccctgagcttgagcctaatatgtctgctgagctcctgagccaccaatcccaagcgatgcagcgaggagcagccccaaccgcatttgcacccaaccctggtttcattatccctccagcacagcccatgtcggttcctcaacctggcttgtctgcgctttcgaatccacccaacattgcgaacctcattagttcactggatggccctagtctttcaactctcttatcggcactccagcgacctccccattcgcaacctgtgtctgctactcagtcgcccttctcctcaccgaacccacctccggccgacctcgccagtctcctgaccaacgcacatcggccccaacccatgcaaactaccgcacagcaaccccttcctcacccacccttcaatctccaacctgtaaatgcacccgtcatcactgatccaaccttactctcgttcttggccaaaggactgggtggacaacagcagcagggccagggacccgtcggtgctcaggtacagaacctgatgcagcacctcgctaaatggaagcaatgatttcacgactctcttattgcctatcattctcattcgaacttaaggttcatcttgtcatcattttcggagcctggcgttcttgcaatccctacttggtggattttagtgctctgcttcggttccttttttttctggctggccgaaaaccagttcttgcagcactaggcgtttcctttgcttttcttttttgctctttgcttttctcatgtgtcacaaatgcagtaagatattaggtagatattagggcaaggcggtacctaggatggagttgatatgtctttttcaatcattggactcttgctcattgtgaatactggtttattcccccccttggacatgatacggatgtttcctgtatacttattttcggttatattattgctggatatctctccatttgacatcaaagcgtgtgctcaggcagaatgagtcaaacttcaatcctccaggtaatcttgtagataagttcacgagttatctacatatagtacgcaagttgagaatcttccgggggctctcaatgcagtctcaacaccaaagccctcccatattcctttatttgttgcggagcagaagacatacaatgcagtctcaacacttctgtttctctcgcgtctccttttacttggctatacagatagatcactgcagaattgtatgcgagctggtcttccgttaccagggaataaaaacccaacatgcaatatatagttacaagtatgtagtctaactcgactgctgccgtaaacagtgatgaaccctcgaccttaaagtatgggttatacggggtataggacggagcaagcaaagcaccccaagcttgcagcttctagcaatgtacctaggtcatcatggtacgtgataagagaggatatgctacatattgtacaaaggttaccgacaaagtccccctggcttcttatttcggattccaacctttctccttcaactccttcaccttagccgcatcctcattttgaatgcgctcgatcgtcttgtcccggttgaactccatcacacgcttttccttgaagtatttcacctagtagacgccaagaatcccgagtcagcaatctgccaatggatagatgtaatgtagagaaagctaggaaacaccaagaatggcagttatgagtagcaaatcaaagatcccatcatacgtacccagctctgtgaacatgccgcctcaaactccgcgacctcgttcgcgcacttctgtcgtgccttcttatcatctttaatagcgtctaggatatcgttcttgtcaaggcaggcgaaaaaatgatcacggccttcccagcagcgtgcgcgactcgttcggtctggggcaatgcggccgccgtcggaggctgcgttcttgtttgaatcaccggaagaccaaggtagccagaccattttggagaaatggttatgtcggagagggagcgggtgagaaattgagctgtcaagttcaaaatagtagagtcttctgtggtttgtagcgagtcaaggtgttggtgacggcagatgcccagatgttggcgggtcaggcctgtgaccgccaagactgttgatcccaagcaggcgatcttcatctccggaccctttctcacttacgcactccacgttctggagcttacatataattttgaggcctctagcactaaatacttatcgtccctggatctcacttggaacaccctcaccgcattgcatgttcccttcccttcgcctccaccgtcttacccgagcctcgagcctcgagcctcaagctcaatccgacctgacacatcgaccttgaaccaagttcgcgagggtgacaagagcccccagtttctatttagttgatgtccgcgcgccgacgtccgccagcggggtcacgcaccgaactccctccgctgaagattgtccgcaagatcctcttgctgcagctcgcttactatgcctgcgccacggtgctcatcctgttcacgacagttgtctatggcgccccattctctctagacctagtctttggctgggactctctgcgcggtgatacgacccttggatggatgttggggttggtgtggatgttgaattgctttattaggtgagttgtccgctgaattccacatcgtgagcagcatttcgatcagcagctaattataatctcctctcggggatgcttagcgtcatgttcctactcgttttcgtatcccgctcaaaattggtcccggatttcgccctgacgatccacttcctccacctcatcgccactactttatacacccactccctcccttcaaacctactctggtgggcgcttcaattcgccagtgcatccatgatgacgttccttggcatgtgggcatgccaaagacgggagctggagcctatcaagtttggtggacataatggcagcgcccaagctggctcgtcgccacaagcatctgccggcgatggtcagcaggagtcgagctttggccgcggccgcggccgagaacgtagcttgcaagaatatgaaatggatgatatgaagcgcacgggtgagcatgctgtatgatttcgcattcgctcgccccctcgccccatcgttgatgttccccgttgggcgatgaacgactttttgttgccctgttatatcattttttttttctccttcttgcgcttcggtctatcgcggactctttgatgcattttttccattctgtatacccttgcggcagttgcatctgtatagatggcgtttgttctgagggaattgatttccatattcttttgttcgatacctgtttacattaatatctgctagctttgtattattcttctcagttggatagtctgacgggctatgcctatgaaaaactcgtgtacaatctctacttctcgaaagcgacattgtcttgaaatgctttgaaccgaatcggaaattgttatatattgctcacaccttacagtagaaaccttccgtttgtctcttcgataagcaaatcatactcaggctggaattcggtatagaagttgtgctaaaaattgtcagcgtacatattctcaggtgctttggcatatatgtctattccacttacgggattctgagcagcatcggcggtgaacttggccgcttcatccttgatgatcttctttggaagaccattggctgctgctgcttccgcaagaagctgtgactgacaagcattctctagcatagagtagaggatcgcggcttcatcaacagttcgaccgacagttaggaggctatacatgagtaaggttagatagaactagacgcatatagaaaatgcaatggcgaaaatcgactcacccatggttttgcaagatacatgcaatgttttccttgcccaaggcccttgcaatcgcctttccttcctctgccgacagaacaatgccgccatggtcttcgtaaacacccactctgccaaagaagttgcatgcgtcttcatccagcttgttagcacaaagccaaacccctaatacgactccaagtgtaaaaggaaaagccaccaaccttgtgtaagcatctcgattggctttccaaatgaactccacgtctttccatgaataccatgcgtgtgcgccgcagccacaacatctggacgtgctttgtggatctccgaatgaatcaggaatccagcttcattaacaggcagctgagctccaccgtcgacgacgaatccatcagcatccagaagaacgagatccgaagccttgatagtcgagaaatgtttggcgaacgaattcatccagaaatggtccttgaggattgggtctgcaaggcgtcagaatattcttgctcccataaggtatatttcatttaaacaatgtgtctgtatcaaacctacctcgcatcgaaatgtgcccggagacaccctccccataccctagcttgccaaagtaccggaatgcagcagccatgtgctccttcatccacttgcgcttctcggtcagatctgaaaatgtgggaataccgcggagtttcagagtgccatttcggcctccacgagctaggccctggaacgatgcatcgtttgccgctggtggtagtgggggtagttggtcttcattggtcaagcgaacagactgcacttgctgtgttattgttgtagatgtcgacatgatgaaagattgtcttgatttaccgcactaactcggggactgggccttttaatgacgagagttcgaggtccggtactcgggctaacctccgagctcttatctatgggggaccccgctctgtcgttggaaggcgccggcagcaaattggaacagaggcttgtcaacattgaatgcgtctggattatttcggatttgaaatcaagtaaatattggctctagcggcgtatcatgccattgtgataagattatcagattggtcaaggtttcaaagttggttctctgcctctgaatccccgaatttgccagcattgtcaatatacaccggatttcaggccgcgcgaaatagcttcccctttcccttagtgcgcacccttggtcgctctttactcactgagtatgttgtagagctgagcacgcccctgtgtatcgtagccattaagctcgctgagcatcaccatcacctgatcattatataagccggatacttgcatacgcgactatcacatgacatttactatcctcagccgcaggacagcaaagtccactagacgtttggactcccgttaggactagatagtcgcttatcctccggttcttggtgtaatatagcttcgaagacgacataatcaagataagtgagagctccatgcttgaaccgatagcataggtaaattgttcatttgatgtatttcctttagacgatgcgtagatctacagagagctttaggaaatatgattatatatatatctcgaggcggtgctggcctctgggtgataggaaacaaagtcgatatttctgtttgtctagccttttatccagcctagagacgatattgcctggttttcctcggggcttctgaaccacttgcacgcacaatgaagtcgcagcctctgatggtgaccctctcaccactcttacgccctcgcattgcaacatccagcccattagccattgaaggcaaaccaccactggctggtcccaatgcatattttatctcccattggccatccgtccactcttctcttcgcgcgctcacctcctcgccagtgatttgaacaaccaattctccaagggatgttcgcctaaccatgtggatctgcttctgataaagcaccaaataggagcccccaatttgtgccagaaacgatttggtgacttggtgctggccctcttccaggacaccctcatgagactccaagatccacgaaagaccacgccctggcccatctggccctttgcgaaacggaacatacctccacacctcttcataatccgtcatcaccgctccgggtacatctggtcgagccatggtcccagtctccaaaacatctccattgggtagcgggatgaatggacatgggttgctcacgttgaaattatggtgggagtcaatctcatgggtgaacaccacgcgccctgtgttaagttagtcgtttattgtgtgatgcaccatggccaggaaatccgattgagatcatacgcgggtctttgctttcctgaacacattctcctgcgagggcccagtcgattttgccggttcgtttatcgactcgcagatcgacgtaccattcgccaaccattatcaccagtgtgtcggtggtttcgaagggtgtttctgatgcccatcgcattgagattcgtgtcattagaatcgattccaaagctgggacagatgaacttgacatttttgggatgattgctcaggatgcctactctgaagaacgggcgtgagaaaaattgacaggtcaaggatggtacagggtaatctgcatgattcagttggaaatataaatacttcaaaacaaatatgctaacatgtttccgatcaaagtgtttatcacaatctccaacttccaagaaatccgacgccacgctccccaaagtctcgctggcggttgccgttttcgcggactgagataaatgactcacttagttattcatcgaaggtcgaaaaactattcacacatttagtcattataaagatgataaagaaatccttaataaaaatgtgaaataccatcccgtcctgattctatcgccgcttggcaaagtgaaacgcaatgacttggattctgatcgctgctttcatagtagcctttcttgtctaccaactctcagtttccactttgtttagccctcttgcacgaattcccggtccaaagactttcgccttaaccaagttcaaattagcctatgaggactacaaaggaactcgcacgcgaaagatcaatgctctccatcaccagtatggacctgtcgttcgtatcggccccagtgaggtgaccttcaacagcacatcggccgtgcgtgcaatctacggcgctggaagtggttttgagcgaactggcttctaccacatgtttgaggtttacggtcgaaagaacatgttctcgttcgcgaccacgaagcagcatggagaaaggaagaagctctttgcccacgcctacgccaaatctgcgatgctcaaaggacagaatgcacaaatggtcgagcagaaagtcaaactgtatatggatctgttggaacgagatggggggaaaagcgagatcttttctaccttgcactatttctccctcgacacaatcaccgagtttctttacggatctttcggcaagactgcatgtcttgagggacagagacaagattgcgcactcattggagacatcatcgatattgcccgccgcaagctatcgtggtatgcagttcacttcccccacttcacggaatggctctactccaggaccggagttactggctgcattgcgaaacggttttacccgatgcagatgccaacgacgtacagcggtatcagacttcacgcgctgaaagccactcagaaatatgccagtgcttctgccagcgcgaaagcgagcacatcggccctgatatccagactgtggagccaccaccattcccaaaaaccaaatggactagatgatcttgatattgcatcggaatgtgccgaccatcttttggcaggcatcgacaccaccagcgacacactgatgtttctgatttgggctctttctcgaccagaaaacagacaattccaagacaaactcattgaggaagtctgcaatattcccgaagactcgctcgattcgaatgccatccccaaggtcgaaaacagcgacaagctttcttacctcgatgcagtcatcaaagagacactacgcctctacgcacctctccccggatcagagccacgctcacttcccacagcaaccataattgatggctacacgattccacctgggacggtggtttctatctccccatacgcgctccatcgtaaccctgacgttttcaaaaatcccatgaaattcaatcccgaccgctggttggatccttgtgcgaacttggcagaaatgaagaaatggttctgggcattctccagcggtggaaggatgtgtattggcatgcagtatgttctttgtttctgtggagtcgacttccagtcgtgaccatgaaagatgactaacgagaagcagtctggcaatggcagaaatgactactttggtcgcagccatataccgaaaatacagaaccacaccgatgggggattttgacactgtctcccctggtatcacaggtcgctatgaggtgttctacgatgatacttgtagtcgaatgcgggtatgtttagctaacatatttctctcgaagactcactaattgtggagacaggaacatgaatgtcagattgaattcacgccacattaagcaatttcgggatatttatgtggtcgtctaagtatgtagttgttgtgccatgtgttttgatttgaatgggctcgcatcatattggggcttcacagattagatgatgattgaaccctaaattttattatttgaaattaaaagaattacatactattttctcacagtttctaatctcaaattcgttttcttctgtgatattgcaactactactactagtactatctcaatatctccacctggccgatcttggcaagaaccccacgatgattgtggaaagagtcagcgagacagcatgtctcattgatcggatttgcaggatttgctgatctgttttatttggtcttaagatagcgctaaatttataaagagcaatggctgcccccaattctactcatgtacaacgttttgaatttgttgaacaatcttcaaaatgcgcttcactacttccacattatctcttcttttgcagggcgctattgctttgaatatcggcccagaatatagtcatccgatagaaggtcagtcacgcaagatgacccaaagatcaacttactaaacagacaatagatctcgacgtcgatcttccattctctcagccagtcacatttgcccacctagaatggcaaagatgtctcgcagcatctcacaataatgtatgcagccaaaacatttgtttaccaataattccacagagacctaaccttcgcaaaagcctcttgacatcgccattcttggcttcccctacgacacctcaacatcatatcgtcccggagcaagatttggtcctcgaggcatccgcgcaggatcggcgcgtgagaagaagggccgaagctataacaccgtgtgggaggtggatccatatgaagagggacttgaaattgtgagtgtagtgcattttaaatcgatgaagtttatgaaatgcaatgtcgggatcgctaatccatcattagattgactgtggtgatatacccatcaccccattcgatgccgcgcacgctttcaaacaaatggagcagggttacagacaggttctttaccacccgacgtccgaggaaaactcatgggaacatcctcggatcgtgagtctgggtggagaccactcgattgtcttgcctatcttgcgatcattgaaacatgtgtatggaccgatctccgttattcacttagattcgcacctcgacacttgggatccttatgagggttacactggaatcgcgtccaaccagtcggcaattacacatggaactttcttctggcatgcgagtcgggagggctgtattgccaaggggacgagtgtgcatggaggtctaagaacgaagctttttgtgagttgtgcgtggctcttgtcgggaatgaatactaatcggaattatcaacagagtcctaaggattacgagatcgaccgaaatgttggatttacgattatcgaggcccatgagattgacgatatcggcatgtccgggatcgttaaaaaggtccggagtgttgtcggggatactccgacttatctttccattgatattgacggtgagattgccctttcctctatctaagacacagcagatactaatcctcaactagtcctcgatccgagcattgcccctgcgaccggaactcctgaatcgggcggatggaccactcgtgaattgaagcgattcattaaaggccttgaaggtgtgaatctcgttggtgccgatgtggtggaagtcagcccaccatatgacaccgttgctgagactacttctattgctgctgcggatttgatcgttgatattctggcttccatgtcgaagttgaagacaggtcctaaggtgaaggcgccaagttcaagagatgagctgtgagcagagcttgacatatgtttcaaactttgagatttcaaccatgtatgaatcacgctatatgagactttgctttcagataggcaagaccaacttgcccgattgtttgagcgcatctctccagttaagcacattctcatctaaatccatgatgttccagatttcctgtatgactttccattgccttttgaaattgcccattgagtacctctgaactcgctcccaccattcaacccaaggttgtcgatcgatcgcctcgcatgcagcgataaatgctggccaagacataggagctgcgcgttttccgtcacttgagtatacatctttaaggtcttctgccagcgaaaggttcttccaaattgcccctacttgctgctgaagatccaccgggctggagtcttcaattgctcgataataaaaaattgcgatcgcgctgtgaaatgatagagcctggcaacgtattatctcaagcatcgtcggctgctctagcatgacgtgatggaaagactcggagtctatatcccacgaaaagatttcatcttttaatgccgagcatgcctccagcaagattgttggcacttcagcaccctggtagaaggctaaatactcggccacctgacaggtcctttgtagaagattccccagatatggggtaatcccatacatgtattggatgttggtgtcgtcgtcgtggaagtaaggctgctcaaataatggaccttctgttgtccattgtctatgctctagctcgtgtgctgtcgttcgagccaggaggcttaggaaatggcaaatactgctaacctgccgactggagtcattgggtgaatcggacgcacggcctggtctttccagctgacgacaacccttgagatgaattggaaaatctgaatcttctcccgtcattgtctgatttgttagatttaataagcttttttataacgtggagcgaaagctacctacatcgattgtgaccaaggccagcattgccgtgagatagactgtatatttctcagagtcattgggcgttatgagggcagtcttgagtgcttgtaaagctttggcccgatgctggagaccaagtttgtggtattctcgtgaaccacccatgatgttccggaggtggaatgcagccgatgataatatactgtggaatagtgaaatcgagacttccgaggaaggcaccggattttggacgagacagaactcagggcagccctcgagggcgaatgggagatatgttgtgcgccaagggttcctcggatggaaaactggttgtaggagctccgcgacatgatttttgtagtgatacataagcattgacgtattgtgatctttgaacagaggtattgaaagctccatgtctggtgatggatatattgtgagtgacatttttctcgagtatggtaatgttggagaattcgatgtatccatcatggctatcactgactcccagtctgaggggaaatctatgaaatggatttctgaattaggaatgacattgtcattcgtaattatttcaaaatctccgctggacaagtcaactgtgtccactggactaggagcgatctcagaagtacagtcctgagtctgatgactgttctccaaagaagcgtgaggttcgagatattcaatgccgggttcccggctggagaatattgaaaagggccctatactgactgtgcgcgatggtgttgagattgtgtcaagagaggatatcattcggttgatctcggcatccgaaatgctaggggaagtggattgttcttaattatgatatctatcagtgaatgtgcctttgaaacaaggccaagaagagggtcggaactcacctagtctgacctgcctgcgtcgtaggccttgaatatctcgcttcttatctgtaatccagcacagattcacaccgtagccggcgcattccaggcgggatttctggcaaactcgacacccattttcttgacgctcatcacatttgaccttccgagacctgcaggtccagcatctgttcatgtcagcttgaaaggtacgtggaagttcgaatatagttgaaacttgatgtattaccctgtgaatgtcaccgatttctgctttgcttggcgaatacgtttggtttgttttctaggagctgtcacggggccacccattgtatcggtctgactgtcaatatgagcaatgggagtcacctttcgatggtcgtaagggtatcagagagacccgcgttatggcacaacgtgcagttggatggtcaagaccacgcagttctcgatagtggagctagcttgagatacggggtcagtgaggaccaataattgcaggtaatagccgatgatgtgccccttgtgcaaagatatctgctctggaccccaagactgtggggttcaaatatcttgattccatgacataacatattttggggatgaactccgccttatcaggttggcaagccgaggtcttatcaattctttatcagtgtcttatcttatcaccctatcttggataggccttttgaaaagggaaggagccagcgagagcaagtaatcttagaccagttggacatgtagaatggacgtatttttagccacaccaggataatggcttttgcggcctctgccattagttgggttgatagtagttctttagatgtttctttttatagatatcttctcccttcttacggtggaagaaggcaagaaaaggcttaatttggtagacaacatttctatgtataatcttcgattgatatcattggctcaacccattgacagactggcacggaatgcttcagcctatctcagtgcaactccacctgcggtcctgtatagttcccttttccgtgcaatatccaccacagcgccactaacaacgtcaatccacatgtgatcacactggtatagttcatatcttccggggatgttggcagggtataagggaagcagtaaatcacaaaagagacagcaatgtacatgcatgcgacagaattgacaacagggccaattttccccatccaaaatggaccagggcggatgttcttgcgtccagttatcaaatgtggaaatatcgcgaggaagtatgagactgtcgtcagcagcacaaacgaaccgataaaggccgagaaggcagtataggatcccacataaattgctccgatacatgtcagaaacactccgcatgccaaagttgcatacagtgggctatgccatttcgggcttatagccccgatatgtttggaaaatggcgtcgcgttatcgcgacccaggacatagaatgtccttcctgcggtaatatagcatccaatcgttgcaatgaagatgggtacgatcgtgagtgtaagaagccccactgcacctgctcgggaaccggttgcttgcaaatagatatcaccgagaggagagatagaatcggcgttcacaatgagggataggtcggtgacagcatagaatatggaaatcagatagcaaagaccagttgcgaagccgatggtcacttggcaagcaagtgctttggggatattccgtctcgcactagtcgaagtgtcagcgaaagaagcattaccatagaccgatattgcctactcaggaatctcttctgcaatgtgagtgacgcagtcaatggcgccgattgcaaatgccccgttcaacatgcctgcaaggaatgtgaatccgtcagagtaaccagtaatgttgttccagtctgtccagacgaattcattcgatgcatatcctgctccatccctgcttggcataatagcacaaactaagactgagatgacaaaaccgacaataatgaagaacgatccgatcctgctgatgaccgcgagagcccgttggcagaacatcacagtaagacaacatagccaggtgatgatcaaatagcaaacaaaaacatgccagcgctgcggttttacctctggatggtagagcgtgtatgaatagacaatcatgcttcctgtcatggaacagttccctgctacggcgaatgtccatgcgaggccattcaaccaccctgcaaaccagccgcacaacctgccataacgaggaccagcggttattgtagcccagtgataaacgcccccagatgccggaatagcagaagcgagctcggcaattgatgcggcaatgaagcaatagaaaaaggaggcagtggcgctatccttcgtgtaagcatcctaggaaaaacttccgtaaacgtgtggggacctacaactcgtatattactccaggtggtccaccattgtagagtgaggcaatctaagatgttttagtagtgcacaatttggagagagtatctggtgcttacaattccgcctcccaggaccgcccaagcattcccggtagtgattccagttgcgcaagcactcaggagattaaagctcttcgcaagtacaggcgtgacctgagtctcagtaacctcttttgtcgatccttggagggaagactcgagatcgccagggttttctttggtttcaaactgtgccatggcagtagacatgaattgcaacgcagtatgtaagattgtatatcactcacatctttcgatggaaattgctttggatatttatggcttttctttatctttacagttcccttagtccattacaagaaaggcttcgtcccttcaagatatgtgagaacaggtcgctggctcttacttgaaaaccaagatgcgattgaacccgacgatagtattggctaagagatacttttatcttttgtctcttttagatatattatatcgtatgtcgaatcaacctacggagtacaagctaatttctcttcgctagctcttgccatacgaattcatttctgataagacctatgatttcacagtactgcgtagtggcaacaagctgttatcgagaaaaatttcctatcactatcgcgacccccgtgttgagtggtaacgcatacccattctactcgctggctgttgccggatctggatatgctcgcgggcctgatatttccccaccggaccgacctattatacattatgactgcccggtgaagttcatatattccgacttcacaaatataaagcacgatccatccctcttacccttgggctcctatctaaaaaatctcagacttgcaatattccacaaacatggctcactccctgagtaaccaatctatcatcataacaggggcctctgcaccatttgcagaggcttttcgtgcctgctatggcggtaagtttaattagaaatagagaattatatatcagctaacatctatcaaggtaccaagaacaagactatcgcggtcaacctagatcatctaatatctagcaatttgaccgaagctcaggctcaggtaaacaccgctttcagcgctcttggggaccgaatggaggttcttatcatcgatgccagaacgcagcagccatatgggctagactcgatttgggagattccgttgagtgaatgggatcagggacacacatccatgagctgtcggaggaaaatgctggtgcaggcaaagttgttccttcagcaccaattccaggtcagcaagttgaaggcccatgagaatgaaccagggagcggtttttctgttgtggtcctcggttatcaagatctcttcggtgtttcactcgatcaagttatttctaaactccagagagacgtctcacgacttcacccgggtgcttctttcaacttccttgatcttagcacctcaagagaggcctctgtcgcgtccatcgtcgcggcaacagcgacactggtctcagcgaaacccacctgtggaataatctcgctcagcgacattgcgagtgtaaaccccactgaaaagagcaaaagcgacaatttcgttgctgagaatacccagctttgccaaagtctccccttccatcataagcacccaaaggtcaaagttgctttgtcgtttgactttgacgcagtctctgccttcctggggacaggacaccatccagacaacaacttggcagactacagcacaggcatattcgccggtcgagtgggtgccaatcggctactgcgcatgttacaaaaacaccaagtagccgacaaagtcacttggttcatccccgggcacacgatggaaacctttgaagcaactgtcaaggagattgttaagtccggtgccgagataggacttcatggttattcccatgaaggtgcctaccaaatgacaccaagtcaagagcgagatgtgctagtgaagtgcatggaattggcccagcggctaaccggcaaaagagtgcaaggctatcgcgcgcccatgtaccagctgcgcgaaacaacaatcgagcttctgagggagtttgaatttctatatgactcctccctgagtcaccatgactcacagccatattttacacccagcgatccgccaattaaaccggtggatttctcccagccggccagtacgtggttgcgccccacgccgctttctgagacgaatgcccgccccgtcggccacccacttgtggaaattccgaccggctggaataatgaagatatgatggcgttacagtacttcccgcatctcgacaataccaatgggcaggttgatgcacgggtggttgagcagagatggaaggacatgtttctgtggctgtgggagaatgcagacgttgatgggggcgatggaagctttgtcttccctatcttgatgcatcccgataccagtggcatgtcccatgtgatagggatggttgatcgttttgtagggtggctccggggatggggggacgcagttcagttttgcacttttgagagtatcacacggcagtggttggaagagcagcaaaaggccaaatgaaaccgtaggatattgatttatagaaaatgaatatgtttgtttgtctaggtgattagaggaggaatcagattactccgtatatctgtctttgatcgaggtatattggattcagttactgggtagatcattatatatctatagctgctttcacaccctagagactcctgggataagcaattataatctaagttcccaatatgtaagattgctctaactatatcgaacgaaggctagctctacgtctgttttaaaagagcttctacccttgagaatgtttattaggtataggttctcgcagaaaactctacattggcggaatctcatggcgaatctttaaatcacatcctttttgatacccagttagctcgtttggttcttcaagaaaacatcccttgtgtgctagcatatagcctccccaatttataagatctttcccgagcctatagtctgtcggtcttaatcttgactggacaaccgacgagggactggtaaatctttggactattacttcatagttgacaaaagacttatcagtcactactatggccttatgatcttcttgccaacattattcgagaaactcatggttctcaatcctcgacgtagatacttgccaggcccctatttagtcctttgacacgccattattcattgtcactggcaacttgtttccttccagactcgacccattcttgccaatggtctctaaaacctttcctgatcggtgaacgaggggtgcgcttcagcaaaacccacgggaaagagcctccgtgtgttgtcttgaagaaggagcccttgggataaaagcagtagcttccacctaagaatttcctcttgtcaacaatacacctctactgctcgcatcatttgtgctgccgctttcttctgcttcttctttttttttgataaagaaaacaagatctccccaatggcagatgcccagccgccgcggaagccctgtgttagtgttgatcaccactgccatacctttctttcctgcatccctcccaatcctcaatgcaatgatacttctaccatgaccatcatattccatatatagactgtcgggatacgtactaatatatgacagggcttctgccacttttgcaacttccctgggcacacagaggagaattgcaaccgcctgagggcattggggtcactgaacagaatgtccctcttcccactccccgtaagacctatatacctgcttctggggaagtttatattgattcaagatgtgattgctacagaaaaagcgcaagtcgcaccgcatctttcgaggcgggaaggccaagaagggcatgtcatgttgtttccatgatatcttacccaaaattaactctcacctcactctcacttaatctctcgcttcatctcatctatttctcgctccattcttctttatgttgctgtctttcactgcttcattgctccgttgccctgttgctccgttgttccgtttctccgttgctgttgtgccgcacagaggaatggctaacgtatgaacagccaagactgctgcagagggtacgtgttcccaaacaattctacggaataagccaacaaaatgctgacgtaccttgtgtgtttagcagccgcctccaaagcagcgctccttcggcagccaccacaaccatcggtaagccaaatgccgctatactcgtgttttaccgtagaactaagtcctgtcttgatgtattgaagtgtgttgctactcttcgtttgttgctactctgcgtcgtgttgctgttttgattcctatttatttttcttgctacgccgaactgtcactgttatcgagtggttgtgctaacagttaattagtggccaccccctccaacaaggaggagaagaaacaggagtgagaagtcttgccggtcctttttggtttttagtttttcctttttgttacctgtctctgtttcttatgagtccgggctgtggcttaaatgcaatcaagaccggcgtgaccacttttaaccactcatctgccgtagagagtaaaaacacgtctcaaattcatgctcccatatcattggctttgatctgagctatcataaatttccatatgcctgcttaaaagcacgttatgcccaatttcgaactttctgaacaactttctttctgctaagccaggtatttcactctcttattctggattctgaccctatacactctacctatgtggctcagcctagttgagttgccgatatagtccgtgaactctaaatatacatagctagcaaccttaaaaatcccgtgggcttcgtctggatgttagctaatcagccaacttcacctgggcacctccaggctaggtaatcttagaagctctagagagggactaaggacctcaattttgaagcgtaactaggagaattcatcaactgtagggtagtggttcggatccatgattacacatgtacacgtatgcatacataggtaaaccttgggagaacgttcgcatgacacctacaccgtccaccattttctctttccacattttcctcatttttactccttcaaaacacctcaatatggccgagacacaagatcagcctcgtgcgttttcttgttcaacaagccagagatcttgagcctgacttgctttctcttgaagacttccagaggcttggagttcaagcattccaagtatccctggccccggaacatggcgaaggtctccaatttgacccgtgcttctttcgaccacaccccgacaaactgtgtgagaaatatccaatctacatttaccacttggaagatgatccacgggatatacaattcaccaccttaaatgattacatacaggatgccctaactgagcattcccctgaatatgctccgataattgcgagaatggaatacgaggaggattctgatgttccaccagagcgtgatccatacatgcatgcccaggatgtagaggaggccattgagtctcacatcaaggctggaagatccggaccgcatgaatgtttctcacttgtaaacttcagaaagaaagatcaagaacgttggaagtaagtagacagtcaaatattggattatagcatgggactaacaattcctagcccaaaccaaagagaagaccaccctcgtgtctacgagggatttgaagatccaaaaccgtggcgtgtggtcaatcattaccgatacatcagtcgtcctcttaagccgcattcaattatgtcgtgtctcgctcaaatttggcctgatggaaatcagagcctcactacccacgagttgagagccatcgttaacatgatgcttcttcgagtgaatcacaaatcgtttcgcagatgccatacccacccagtaggtgatttcccatgttttacatgataatgtctaagaccaatatagattttggttctctcttatatgggtggtcatcacggcagaatcattcaggcttcgtatgatggaaagggactgattctacaatatcctcaactatggagctttgcggatatcaaaacgacaccggtggaattgttcgttcgataccgtttaagcgagccagttggtgctattcgcacgttgtcccttgaatagctacatgtttaaatccctttattatgatagagcagttcatgaagcagttgctgaagtagtgtttggagcagttcttggagcagttgttgacgtgataaaagtgacttaattttgttagtggtttatatacaaattgtaggtatctaccgtcttgctagagagtaagctgaatcccggtgtgacagagtctagcgacgtaatctttgacacccgaataatataagtgttcgatatcttcaaaataatagatgctactacaaatacttatcgatatctatcaatcaatagtggaaattagattaagttgttgtggttgaaatataaaattgtactctatcgcataggtagctccctcggttgtggtggtggttccggggaatgtatcaggtgactaatcaatgtcacctgatccgttatcggccatgtgggcttcctatctccaggccaatatccctctctcctccaatgaccaagtcgtctgatgtcaaaacattgagagccgcattgaagacatattaattccaaactctacattcccctgactggctggattaaaagatcttctcaagttacttcattgctcttctcttctatgcagccccattgagatagacattggacttgtctagacccatcatggtggaaggagatccgtcatacatagactatgaggccttcttagacccagacttctccccatcttcattcgccaatacattggtgacaagcacaaacaatgcaacagataccccgttggatttatcaacaccattgtcacgggtgctcttcgatcttcaggagatcgacacacacatccatgcattgacaaccagatcagcactaccattgctttcacacacccaaagccaaacggctgccgctgataatatcttgaaagaatctgggacgcagattgcttctgtgactcaagggtacgagcgcctccaaaaggaggttgtacaaaaatgggaagcagctgacaaagctcgtgttgctgctgaaaactcgcttgaaactgttcgcctagcaagggcagtagcgcgctgcttaactctgggtagacagctggagagccaggtttctgaaattacaggccgagggccgaccccatcatcaggaccggatggagcaacatcacctggaaaagatggcttccgcgcactggagcgagcagcgtacacaattctgaatctgcgcgaaatgttctcagccacgacacagggcgatgaaggctatggtttagatcgggtgaaagccattcgcactctacgtggagaatttgtaattcccgcggagaacatggtcaagtcaagagcacaacagaccatcagtcgattttctttgtcttccaactcggcaagcgccaatagccagtcatcaatgccatctggctataagcaagctcgtgatgcccgagcacgactggccaccgctgccataactctatatcttctttcgcctctaccaaaaggcgcaagcactgcagccgactacaagccagaactcttattgtcaacattacaagggttcatgcacacagcgatcatgacatccgtgaatgccctcgcccgggctctcacccagctcccaatcatgaaccaaacacttgccgacacctctgcacgatgccaagatatagttgccttggagagcattctcaaaaacatccgcccaccaccacaccctctcttggcgtccactgccacatccgacgaaccagctcccgagtcccaaacagcggcctcgaacaaatataatctcctgcagcctcttctccaggctctggacaccacatcacttccttcctactactggcgctccctcgcctcttctctcgcgccacgtgtccaggacatcgtcaaccgaggcggtgtttcttcccgtacattacgatccaaccgtgaccgactaagagtcgagatcaaagagtgtgtgctccgtgcgtcgcaggtgtctgctaccagcctgctggccgagaagggtcgaccaggaaccgacacggtagtggttggaaattgggagcgagaagctgccgtgatggtgagctccattgttggttctctgggacggtaatatgtggctactgcaagcatggtgtacatgttaccgactcaagattcggtaccagatagatgatgtcaatcgcatggattgactacagctttaatgagaaatatagttgtatggcattatctatctaaagtgggatattacacccgaatctgttgtgctctgatatttagatgtgaactagagatccggggttgattcttccgtctcatagaatgagaacagtcggcgaggatttggaataccacataaagcacttagtcactcgacaagagaaactagaggtcttgaacatgataggtatcagggccagcgatggtttctgaatatggaacacgttctgcagccattcttctgggaggacattgagactagcacaagtgctaatggctcttggtatatcgatgagtcgtctctgtgctttctaacatgaaggagagtcatcagtaggctcttcatgttcgtcgacgacgatgtacatgatatcagtgtggatttgaagaattgtcttgctactgttggtcattataggaaggtcggcgatgaatgacgtaacgataataagaaaatacaaactaatagccaagctaagggaggcgttcgtaccttcccagagggacaggacgttccacggaaccgatcgcgtggcgacggataacaattgcatggtatgttttcggtgtttcggcgtatcctcggcatccatgtcgccgtgctcttgccagacaacaattgtcgttgtgtgggtcaatgttgccacgggtgcggattgtcttttgaagatcttccgggtcctctacagtacgtcccgaaactggtgcaaccactatactcttcgattgacttccctgccccttatgccaagatgcactagtctacatttggagttcttctggtagttgcgtgtgtatttcaccgtacgtatgttacatagtaatttcgggcatgtatttgattgaaatttcaatatatccgatacctctatgcccctcctccgaggcagctttccttgggaggcgcacttaacaatctatcacaagtggtctaaccaaatatagctcaaaccctagccccttccgagcatgagcttatctatgatatgattcacagtggcgaactatctataactaagatggcacaggccgctagttataataagagtactatctcgagaatctcttctaatataagaatgtttagtagcgttaaggtacctctaaataaggaccgtgcattgatcttatatggtacgaaaacgaatccaggattccccaaaaggttgttttcaagttcaacgccttaaacaagcctttaagaatgcaaatggcctaggatgaactcaacattctcaagagtctaccgccacatcctaatataataccattcgatcgcgttgttcttaaagaccaggagtcccgggtgattgggttcacaacgaagtacatccctggaggaactctcgccaattcaaagatcccttttcgattcgagtggctacaacagcttactcaagtcgtggattttctcaacctagaactagggatcatgcaccaagatatcgctccccgaaatctgctgatcgatccttgcacacataagatcgtcctcttcgacttcgaccgggctgcatccgggaaaaaacggctatacgaaggtcgagatgatgttactagtgtcgtcttcacactctacgagcttgtcacgaacgatacatccttctcgggtatcatccactcggatcgacatataggcatggtgcaaagtatctcggaatggattgttaatcgcgaacttgactctgacgtatcgaggtttcgtaacttcttgagcgaatgggtagcaacacgaagatctgacggggatatggaaaggtatctcaatgcaccacaccgatttacatggccggacctaccaacagcgcccgactacaatgtaccattcgagatgggcacaacctgggatggaaagccaaactagatgactggccatcggtctagattcaccgcaatgaagatggggcagtactgctttcgctgggagaggccaccacagagccgctcgttgatcgaggctgagaatagtgtatagtggatcagaatactagactgcgaaatgaaggaatccatatttataatactttcaaatgattggtgtactcctgatgcatgttgagtagtccaaataacacaggattacctttattccgaggctagtctatatacaacctaatacgtctggcattaggggtagaaaacgaatataagagtaacaggtgctaaaaataatttccggacgccgctatcagctggtctttccttttgtctattcagcacgcatgagagcattttaacggtagcatcacgggtgaaaataaacagcctgccaggcgggattaagggagatctggattcgccatagaattgtatattctcgcacatgtcagtgaccgatggctcacttggttattttaaccgattgtaagatggtggggctctttcttctgttagacagcatcacgctttctattttcgggaatttgcgccattctgcagcgtctcaggctatggatgctgctacagtggatagcgagaacatcttcctccccaacgactgtctttctgttctcggggcccacccactcccaaggccttagcgtgaatcctctaactagacctcactaagtcgagggccactataaaatactctttacctagtctatggccatcaatttttaccgcccaacattcaaagaacggcatataatataacagggagagatataataccatacacaattcattatacagcggcccctaacttagtatggcctaatgagagatcgacgctaaagccttacccaagaacagaaaggcagttattaggaaggaagcagatttcgctagtaactataggctgttctctaatcaaagcacataatatatctagactagataaatattttcgttgccagtcacttccttacgtcgatttaccctaaggccgatgtcacgaacgaaccgccgggcggcacctactttcacactgtgcttaataaagaaacctgggtcttgatccttataaatctgcataaggtcaagacaattttcgaggatcacatcgtgtgctttgttaatgttctccctgaaagtctcgttgctcacccgcgattgctgccattcagtatattcgtctacagcgacatccagcaggccgtcaaccatgattgattcagtacagccgggcccggtgagtatggcgtcattagtaggagggtgtatcgattgctgagatgatcctgctgggaggatagtgatattgattggaggacacatggaacccattgtagagttctccgcagctttctttttcttatccagtcgctggttctcctcggcatagagctgctcgcgaacactgtcagggacaccagcgtaggtctcaagaaccccaccttgctccacatatttgacgagggccttcagatggtgtgtcttcaatctatagtgcctttttccctctggatcttgccagcagtattgtccttcgtggcgacatggcggcccgggacatcgcatgacacgatacacatcgcgccagagcgggagggaagtgacaggtcgccagattgtcgaggcactcctcagctctattgtttgccttttggcatttccatggaaaattctagttcccttggatcgccaatacagttacgagacgaggcaccgtattttaataatagtaaatcacggtatcgagactggtacaggaatattgatattcctgggctattcccattacgttctagtgtctcttggcggtggggctagagaatcacctgaagagtgtaggcggttgcaccagtttcgggacgtactgtacgcaaatgatgattcgactttgactttagcatattggccgatccctgcgttacagttgccacttataaggtgttcaccacagtagttgccccatgcctttgagaggtgttttggtgcctaggggcacatctaggatgtgtcagaagagactgatgtacaggaggtggtaagctttggggaaatggaaaggagtgaagatagtgtgatgaggggaaggataaaaatggggatgtaggagaatatattgtaggaaaagagtgagtctgagccgaagatcagaagagaaagagaaaggaacataattggggaaaaggcggaagaccccattctcctgtcattgcgtagatatggatatgcttatttgagcctcaaacgtttgaatgtgaacggtcttcggaaacaaactaatagaagctctcactatacacttgactccacgtaaacaaagcatcaatgccacattttcagactttacttttccactggcaatagttgctacataacgatcatctccttctatactcaatcctagaatgatgccagctctctcgtgtcttaactattagattctaccataactgtaaatacctgaacgttgacgtcgcaccatgggcgacagacccttggaagtaacaagcacctcggcacataagagcaaccaaccaggcgcgaagccaagacgcgaacaattagcgtacctgactaggagcaaaaaaaccgctaggtacattcggacaaccatcttagtaccaggttattgggaccagatcgtcagatcgtcagatcgtcagctcgtacagaacccaaagcaaaaacctccgagcatcggaaataatccccatacaatgtacatatgtactctgtatatacacattaaatatgatttgccgcagataagcgagtaatatacatctgcaagtgcgttgtacaagtacccgagcgctggatgttctagagtcagatgactcccacgcagtgtaccactaggcagttctgaaatggctgaaagctggtaactatgtgtactgcatgttgactcaatgccctagatgcagaggggacagatgcatgtcagttgctaggaggtgagggtggttggtccaattagcttgtgggaatggcatgggtatggattaaagaggtaagtgcgctttgtccgtcccgtccggtctgaaattcacatgtgagttgaactttcagcctcctgttagtacttattgtatgtactatgtgtgtattgattgatgtctaggggtggtaaggttgattgatgttttagatgatatgttagtatctatcttactactccgcagatgctgctatcatatgagacgagactatattatagtaatatttttttaatccatataaggcggctcctacgtggcccccaggtacgcatcccgataagatcaggtacagtttacatggatggacctggtatgggatgcatggcctgtgattggactgattagtaaatgatcgatgaccagtcagattagacggctggaaaggcaaacggatcaccccaggggcaataaaacaggtggcagcatgcggagtccaaagtactgccacataataaaatcccgatctctggaaggcgtggaagatgtggaagtttcagccgtagccctggagatctcacaagtcaaagacgtcagcatatgtatccactgacccggatgggccccggcactataatcaggtttatcgataagccctgcggcttggtacctggctctacttggccgtgcgcctccctgccaaccctgcagatgtacctacaggtacccgggtctaggatttccccctcttctcgtacatccctaggtaggctatttgtagcgacgatctatccatgcgttctgagaccccggtatatccataggggcagacaccatatgtgcgttgcatgttttatttctccgtacttcacatgggacttttcccgtggctttcccgtgggagataacgtcaactaaactgtcgatcatttagactagcggcaggagccccatcctcacctatttcacttatagcacctgctgacatccccgaatcatattccacaaactataatacgtaatgtaccgtccttgctcaagggaaccatgtctctagggaagaggagtgtatatcgcctcttttccacccgccaatcgtgttcgctggatcataaccgaacttccatggggccgatctggggccaatgcggtaccgtacatgagtcagaacttttagatctacaatacgaagtatacccaagggaataagcacatcatccagatcggccgtggcatcagatctcgatctatttcccaggatatttgatcccaaggctaaataaagccaggcgaatagagtacattaaggtacatgagaaccaaggaatcaaggatctaaggatgttgtacaacattaacttccaagcctgggaattgccgtttgcagactcgagggaagtggggggaaagtttagtagcgacgcaggcacgatgggccaacgggcttagtcccagggggtgaaagtttcagatggggagttgcctgaatgcggtttcaacggagctgccggatcccccaggtgacgagctcttttttattattattttggtcttggttctagggcatttccggagaaataagtacatatcgaaagcgggatgttctagaatgtatagaatgtatagaatgcatattatagaatgtgtacaatatggaaatgagatctatctcttatcaacaccccccgcagtctacatgtataaatctaaaattatcatgggctcggaccaatgtgagatcctccatagaagggctcgagcaaaggatactgtatgaaaacttcgtatcgggaccattcggaactctttcccctaccgcgtaaccatctttctggtaagagtatgacgaggtgcgatacatccacgcgatgtaagggggattggggtggtggatgtggttgagaggaggggaatggggagtatatcgaggttaaccctaaaaactccaccaagagtctcgacctttttttttctccccaagaaccaaacttgtcgatgcttggcagtgtctatttccagggtctggaaaagatggttaacgtcaaggaccagtcctcgagggtttaacgtccctctataatagactcctatatcgaccgggggggggcaggattaggtctagacttggatctccaggtcaatcgagtccacgtagctccaggtagctccagatccaagtagtccaagtccctaatgaatcatggaggtgcctggtgccttttggataaaatggagacacgcggatatctggtgaaacacctaatgattcgcatcggtagccccggaaggtctttgagttcctgttcgagttcctgtctctttgctctctgctcttttctttttttgcccctcgcttcctgataagcctcttcttctctcatcgtcaccattttttgttttcttttctataacctccctcgatagtatatatatcctgcatatatactgcaccttggtctttttctctcttctttttcttttacccggctggtcggttctctttttcgtttttctttttttctctcttggaaatatttcagagatgatcgcgatcagctaataaccttcccttttctcttatttcttacattcttgaccttctccccgcccttgcgtttgggatcctagtacacattctatttccgcccctctttctcttctttctctctcagagtaagcgcactttcaaatcgtacgtgttggaactgatccgagtctcttcgggtctctcgtttttttccctctctttttttgtccactcgagtagtgtccaggttactgagtttgcgcaaatgttcacagtcaatccggccagactccgcgtcttgattcaccccgacttctccgtagcgctgcggtttttccgactcggtatagtgacatatagaacttcaactggttttggggtgattattccgatcggattgtcggctttgcgatcactggtggtcaggaacattcgcagttggctctccgaagacctgacatcactcccgcctcccaccctcttacgtcgctatggcttcctttctccctgtcaacaactcggcccctgaagaccacgcgatggacggagcagctacacctcgtgcgatctcaaatagcgtgccggtcacaccggacgtttcttcgacggagcagttcccggacggagtttcacaccgcagccgcggtagcgacacttcatcccgcacaaccttaacccacgctcgaacaccgtcaacgtctgacgaaccaatgcacgattccgagggagaacaggacgattccgatcatgatcaaaatccggggagtaacggacccccctcgaaaaagaagaaaggacaacggtttttctgcacctctttccctccttgcaatctgagcttcacccggagcgaacatttggcccgccatattcgaaaacacaccggtgaacgtcccttccagtgccactgctctcggcggttttcccgactcgacaacctccgccagcacgctcaaacggtccatgtcaatgaggaaatccccggagattcgctagcggccacgggcacacggttccagcgtcaggtccggacagatcgagtgcggccaccaggccgggcgcgggcaggcacagcgggcagtattggtggtcatacccggggtcatagcaggaacttgtcaagttcgagtattgcatccaccgcttcgacattcagccaacctccggaacttcggcggcgcccccctcctttgatcatggccaacgaccccgcagctcgatcccgactggcgatggattcgatgggagaacctccgagcacacccccaggccaaatccgtggcgttcctggtccctcgacagctggatcaccgtacaccccctccaatatgtttgctgttactgggggaagtccccaatttgcgtcgcccatgtctggcacagcccatgggttctgggaaggcaagacggccgcccgtcgtctttcagtcccaacgagtagcaaccctttccttggacagcatggcaatgcgtatcccccggcataccacacccccgccggcgccccttatccgaacgccgctggcgtatttgcaagtcctactagcacgcattactctgcatctcgtgatgagggcaccttgagcgcggctgaggcggagatgcggagaagaacgtggcacccttcttcctacacagggtttccacgccctgcgactagtggcctgaaccaataccatacgcccgacaatgtcccggcctcgttcggcgtgaacggttcgaacgagcatccgccccgactccccggaattgaaagtttcgacaaagtagttcaacggccgataacccctcccactcggaaaaccagcccaatgcagctggatggccaccatcgtccacctaatcacggttttggatctggattcaattacacacagccagcccaccgtccaccgccccccatctccggccccggtcaccgacgaggccatgtatcctgggatatgtctttgcatcataacttaaccggactggatatccgagaccgacgtccatccactgcctccgctactcaatggagtcaacagacgctcgcggaactccaaaatgtctcttcccggccatcgtcatcttaccagcctgcattcggcccaatggctgagagaagccctgaagagtatcggggacatcgcccaagcctttcaactgggagccgcacgcgaacttcccccgaggattccagtagcagtgagggtgtccataccccatccaccgcatcgcttgaatatcatcccgcgattgtgcacagcagcggatatatcgaatctcatgattcctcgctgccttccgatcaccctccaccggtaggaactccttttcgagcggacggctatcgccccggttactaacgccgacatagatatgtggccgccagtcctcccacgcggacggctacgaatcccataacgaccgggagcctaggcccgacgtcttctcggactctcctgcccgacactcgggcatgggtcgcctagaggctcttgtggccgttgccacaagtgagaacaaaggagcagccaagctatttctgtaaattgtctggacacagccctcctattctataccatactacaccattctacatatgaaagtcatcgtcgcttcctgcaactagctggagagcgatcatcattatgtatacttggcatttcccttcccgtctatctcgaactcccaaccactctttccgctccctctacttccaacattcagcccaatggcctttctaggctcttccgattctttcttgtttctctatatatttcggggattctcatacatgcttatgagaagcccttgatgaactgacgactttgacgacgactgatacacgaccgggaaacatagcccatctttcttttacttgtgttcgggagtcttatgtttgtgtttatgatctcttttttttcggacggttctggagggcaatctttttttcagaagttcttggtcctgagctgcatgtcctggcgttcgcatgggaagttttgtatggatggagtcgtgtgcatcatttggttaccctttcatttttggtgtctgcgctgtggctgagtgttgttgcatttcactctctttctacgcggactcttcatctctcccatctctcccatctcgagcccctcccattctctatctccttatctcgccttctcgttttcgttttgtgtcttactatattctttttggggcggatcgtgcctgatgctctaacggactacaattatgaaggtttttgacatcggttacgaactaaatatgactgcaatgcatatgcctttctcctgatcacatgtgcaaatatatttttcgacaaatgtaaaatatcatgcaaacatagaccaatgggcttgcgaacggagcattcaggagcccgagtaaggatgtggagtacaagatcgacccgaaccacctattactagtatagcatactatggatcatccgtacataggcccagaagttttgctctgcgacaatagccagccatatgtggatagtaggaagaatcccagaaccggatagcaatgaggcagcgatgacttgcaggtgacgtcgacgggaagtttagctttccggggctgggccttccaaggttgagttcgtccccacttgtaaccctgcgcgcttctatgaacgccgttggaaacgttattgtagacattcaagagggattggggattggaattattactgaaacaagatccaattgccaatggatatatcaattgcaaaacagcatctgggaaggagaaaaaggaaggagagaagaggagaataagagaaaatacaaggcagaggcaagggtctagcacgaggactgggaacaagacgtcatagtcgattctgtgttaagaactacctataaaaccagggatactccgatccgttagccacagtatctacttcaattacacgctttactccgtacatcttctactcccaacactacactacagcatcatgtcgaagaaccgggttcccatgtatctgggcctcgctgcggcgggtgcaggcggatactacttgtactctgccggcggcgatccttcagcagcaaagcaccaaatgaagagtaagtgttctgtctgataaattcctcggttaatattgaactgcctcggaacattaagctgactctctctctcgctatagttgacgctgagaaggcacgcgagaagctcccaagtacaaataacgccgagaagactggcaaggatttcggcaaggaagccggtgccaatatcgacgatgctgtaagccatgtcctgtccttggtgctatacctgcactgcagataatgtgtcatataatactaaccatccaaatttagatcgccaaagcccgcgctgagggcaaacgtatcccagagttcgcccaggagagcaaagataagcttgatgagctccgcgacgaagcaaagaacaagttcaatgccaatcgggagaagctcaacagcggtgttgatcagattgatcgtgaggtcgagcaaaaagccgctgaagccaaggggaccgtctctggctggctaggtggaaagaaataagctcctttcgcccttgagcgacaattttatgtcattattttatcacgacgctggtcgtttcgccaatatcacgaagaattccatgtctatgcaacatatgcttgtttgatgtcgatgtagtttggagatcgtgtatgccatgttttcaacgcacctggtctgcccagggcgcaacatgaaattgaatgtagctgttcaattatttcccgatagtaaagactgatttggaatttattctctgccatacattagcatcagatatcccacgcgttcggagaaatgtagaggcgctgagcttggacacagtgacattccaatgccggagtactattaccgtagtgacgagaatgccttggccatggagctgatatctttcatacacaatattttcaggaattcattatattaagactttctctcttccttttgaaacgagtcttatattccatgcttgaattgaagattttatagttcgcgctcacgcgtttctatttagcctaaaccggctagcgtgtattttcaacgcgccctcgaacgcgtctcccctttgtaccttctcggacatctcctcccacttcccactttccacttgtacactttccaacttcttgctcgctctaatatctcggtatctcttaccttgtctattataatacacttgtatccatcgcccttgcttcatttattcttcctcgacaggcaaaaatttttcaaagcagtcgcgatgccgcgcacttcccggtcaagctgcgttgcccagccagccattcaagccttcgctcggacaaccaaagccggcatcactccgcaactgcctgcaaagaagatagcatcccttccggtctcgccttccaaaaaacgcaaactgcaggaactcgaaaacttcgacaatggaagcagacaggcaccaattgaggaggaaggcacgccctcgaaaactttgcgactcaatgaattatccgtttcctcaccacgcagcggccattatgtctcgcccaagaaggcctcgcctgcgaagaccccaagtcggaccccgagtcgacgggctgcccctgtcaagaacgtgtcctcgacacccgcgaccccttcaaagcaacgaaccctgaactttgagaaggttattcctgtgaaggcggaacccctagcgattgagcggcccgcatttttcaacgacattctcaaccttcactcctcatttgtgcaagctttctccattcacatggcacacaatggcgcaaatacccctgcggacctccgagaattccttcccagcgtgacccgcctgtggaataagcgcaaggtacagatcaaagacttgcagcgtcttgtgtgggtctgggagcagagttcgaaagcgaaacacatttcatatcgcctggcaaattatggactcggtaaaatatgcatggagcgtaccgtgcaggccaacgtgcagcccccagctttgcaagactctttcgaagaaaccttggacttgttgtgggaaaaggccccggaggcccttcgggatgccaatgaggaggaccaagctactttgttcatcgagtctctcggtctttctacaatccacgaatccctcaccccttttacggttttccagaaaggccagcaacgactccaggatctaaagggcggtctgctccgtttgaaggccgagagaatgcgctcagagtcagcagagacgactcccctggagcggacggcaacaataagccgccgccagagcctgctagatcgcattaagaacaaggagctacgccagtccaagcttccccctccgcctcccaagaacgagctcctacgacgtgcagccgccgatcgggcggaggagatagctgggattctggccatgttgcgtcccgttgggtatgtgggcaatggtatcaaagccatgcttgcagcccaacgcaaacccttcaaactcgacgtgatggtcgagcatgtccgtgactcagtccgcaacgagattcctcgtgaggaggtagagatgtgtcttgagattctgtcggatgcaaaggtggctggtgactggatcagtgtggttactgttggccagatgaagtcggtcgtgttgaagtcttgcaaggatgtatctgccaaagacattggggcgagagccgcccagctgaaggctgactgggagaagtctgcatcttgtgtgcagactcctttcttgtgatttatgatttttctttttggtgtgttcttttgtctttcattgttggatacctcgcatccgcggagctggtctgctcgcggtcttgcatcagcgctcgataccctgtactttaccatatgtctcttagcatgaaactaccttaggtagtactttagcaactaggtcctcggacgcccaatcataatcccactaccacaagaaaagtcaaccctcgccatgtctaatgtttgttaattttttttccccttgttacttacatgtacaactagctagcaagacgaaaacgatgtaaatagcataaactttctacgtacggattaaccaccaaaattacccacttaacgcgcgacgcgtgcacggaccacacgaattcaagcgcgtcgaattggactcgtccaaactaccctgataccagcatttgcgttgtcctttgctgcatttctttttacatcaaccgacaccatgtcttcccgacctgacttgaaggtatggattgagctatctaatattctccaaacccaccaatacagcattcactaactcaaaccctgaatcgacgcaggtcgacgacgaagttggctttattggcttctaccgtggccttcctgcacccgataataatgaaacaatccgcgtatttgaccgaggcgactggtattctgcacacggcgccgatgccgaattcatcgcacgcaccgtctacaaaacaacctccgtgctgcgcaacctaggccgcagcgaaacaggcggccttccctcggtcacaatgagcgtcacagtcttccgaaacttcctccgcgaagctctcttccgactaaacaagcgcgttgagattttcgcctccgccggctcgggcaagagcaactggaagctggcgaagcaagccagtcctggcaacctgcaagacgtggaagaagagctcggtagcgtgggcgcgctgtcaatggattctgcgcctattattctcgccgtgaagatctccgctcgggcagcggaggcccggaatgtcggcgtgtgctttgctgatgcgagcgtgcgcgagctgggcgtgagtgaattcctcgataacgatatctactccaatttcgagtctttggtcatccagctcggtgtgaaagagtgtcttgtgaccatggatacggctcgcaaggacgtcgagctggcgaagatccgggctatcgcagatagttgtggtattgcgatctccgagaggcctgctgccgatttcggtgttaaggatatcgagcaggatcttacgagattgttgagggatgagcgttctgccggtacactgcctcagacggagctgaaactagctatgggatctgcgtcggcgctgatcaagtaccttaatgtcttgactgatcctacgaacttcggccagtaccaactctaccagcatgatctgtcgcagtatatgaagcttgatgcctcggcgctgcgggcgctgaatcttatgcctggtccgcgggacggggctaagactatgagcttgttcggtttgctgaatcactgcaagacgcccgtggggagtcgcttgttagcccaatggttgaagcagcctctgatggatctgggtgcgattgagcaacggcagcagttggtggaggcatttgttgttaacactgaactgcgtcagactatgcaggaggaacatttgcgttccattccggatctttaccggttggctaaacgcttccagcggaagcaggctaacttggaagatgttgtccgagcataccaggttgccattcgtctgcctggatttgtaagcgcgctgagtgatgtgatagacgagcagtaccagacccctctagagacggaatacacctctaagctccgtggttattccgacagcttggccatgctggaggagatggttgaaacaacagtggatcttgctgctctggaaaatcatgaattcattatcaagcccgagttcgatgacagcttgcgagtcatcaggaagaagctggataagctacgacacgacatggatatggaacaccaccgagtttccaaggatttgcatcaagacatggagaaaaagctcttcatggaaaatcaccgtgtgcacggttggtgcttccgtctcactcgaaatgaggcgggctgtattcgcaataagaaagagtaccaagagtgttcgacccagaagaacggcgtatactttaccacgtccaacatgcagtcccttcgccgagagcatgatcaactgtcctcgaactacaaccgaactcagaccggtctggttaacgaggtcgtcaatgttgccgcttcgtattgcccggtgttggagcaagtcgctggtgtactcgcacacctagatgtcatcgtgagctttgcccatgcttcgatgcatgcaccttcgggatacgttcgcccaaagatgcacccccggggaactggaaacaccgttctgaaggaagctcggcatccttgtatggagatgcaggacgatatctccttcattacgaatgatgtttccttgattcgtgatgaatcgtctttcctcatcatcaccggtcccaacatgggcggcaaatctacatacatccgacagattggtgtgattgcactcatggcacagatcggctgcttcgtcccttgtacagaggccgagctgaccattttcgactgcattcttgctcgagttggtgcgagcgactcgcagctcaagggtgtatcgacgttcatggcggaaatgcttgaaacgtccaacatcctcaagtctgccacctcggagtccctgattatcatcgacgaacttggccgtggaactagcacatacgacggcttcggcttggcctgggctatttcggaacatattgtcaccgagatccggtgctttggcctgttcgcaactcatttccacgagctcactgccttggcagaccgttatcctaaagccgtcaagaacctgcatgtcgtggcattcattggaaacggcaatgagggcgagagtgaagctgaaaccgaagagaagaaaaagcgccaagtcactcttctctaccgcgtggagccaggaatctgtgaccagtcctttggtattcatgtggccgagctcgtgcgcttcccggataaggttgtcaacatggctcgtcagaaggctgaggagcttgaagatttcacttctgcgacaactgaaaatgggcaggcacaacttcctgcgccctcgcttgacaaatactcgcaggaaggggtggaggagggcaacacgctcctcaaggaaatgctgctgaaatggaaggcggcaactgagggcaaagagatgacggcggagcagaagcgacaggtcatgcgtgatctggctcaggccgatgaaaaattacaagcaaatcaggtgttccaaagtatcaaggctctatgaggatgtgagctattcatgggatttggcgttgatggaaggaatgggtttgaaaggcattgttgtatactcatcttttacatgttaagataacctagcattctactttatactctaatctcttctagattcttcttatagttctcttataaagtagccaaaaggttgtaacgacggagtacggagtatactccgttaatatagaggccagtcacgtgtaggtcggtctagatgatcaacgcgggattgtgacgaagccactttattacaaaatccaaatgatcgttctttttattgtctccaattcgttcatttgaggtttcaactttcaacaaaccctttaagcctggacttgtgctgtcgctgtgtctctaaaccaccctcgatcgatcgcctcatccagctatgcgcgcaacctcaacgcggacgtcctgaaccatttcgattcatgcaccccttttccgttctcactcttgggatcttcgtcgcgggctatattaccgctaggtgggaccttgttacccgtctatacgaattggccatcttcgcctgggatcacggtgtcgtggtatgtcttccatcggccatcggtcctttgctccgcttgcgactttatcggcttggtgccagcgcacgttatattttcaatgtcgctaatttgctatttagacacgaactgcgaaggggtttttgtttctctccgtcttctttttcctcctcgtcctgccgatcaaccatctcgcgtctaaagagggccaattggtgagccagaactaccacagctgtgggcagcgatcgaaagataaagcgcttgatgctggcttatgaggatttgctaacaggagatatatagcatccgcgccacgtgaatctcggcgtctccgcgcgcgaacaattgcgtcgtcgaggttcattctgagaaaggtggaggatgacaatatgctcatgggtgatggactgttgcgggtattttggccatacgacctcccacgatcctcgtccccgggcgtgattgtcggatggcgaaactcggagcttgatttgtttgtgctcacggtgctggaagatgtcgaggtaggtggttgcaattgccttgtctgctcgttcgatataagctgatcatgctcgggatgaatagtctaaaaatgttgacaatgctctacgggcgggtattctctttcgaaacagccctcaccctattgtgcgcatcttcactctatgtggacgctctcagatgcatgtcctcggctcgaccaactctcgcgagcctccgacttctttcaacccttcccacctggatgtgactacaatattgtccccgaaagctcctcgcatcttctgcccaccagaggcaaacctgtctgtccaggtcatcatgtaccaccgcccgcacccaacacgcatggaatatatgtcgctcgatccgatttcactagccttgggtgataaagcgacgaagacagaaatatgggggccatcatcagatacgatcgaatcagaggaagagggtgacaaggttgggcccaagttgttggttgagaagctcaagcttcatacggtcgtcaagcacattccatcacagaaggagcaagccctcccgctcattatcaaccaagtcaattgtgcgtatgagatgggacagctcatgcacagaaatagccatttgattggaattcgggcgaagagaagtatgagcgtcggagaacgtgtcgtggaatcggcgacaactttatgggggtttattgtcctttgcattgcacatgttttctggcaatggctttggcccgtcgtcacccgcatcttcgtgatcgggcttgtatgccaccggtctgttgcggaaattgtcttgcgggttcttgagtggcgtgctcggcctgatgccgctgctctcaaggatatctcagcaacagcccaacaggttgatataagattgcagcagttctgctactggccgattcaatatgtcaagcttcggcaaaggaaggataactgggagagtgtcacgaccagtcatccagactatattcggttctataacagtctgtggcttgttgccaatgatgtgatcatcgggattgcgttggggtcctacattattgacaacgcgaactgggttgcttcgcaaatcaacactgttttgaccggctggacggtggaggggttacagcgcactatctcgtggctaatggattggccagccggcttgaaactcaacaacgagctggcggcgttcctcggtgacttgtttctatgggtcattgagaactgggcagcttgcattgccaaccttcagccttacctccctgctgtcatctacattgttggatgttcaagttttgcaggagctagcatgccaatcgctcttttctccgaccttctttcgatcctgacggtccacatatactctttctacattgcctctgcccgtatatttaactggcaactcaccattatcatttcccttttccatcttttccgtggaaagaaacgcaacgtcctccgcaaccgaattgactcatgtgactacgacctcgaccaactcctccttggcactatcctcttcaccgtcctgttcttcttactgcctacagttgtggtgttctaccttacctttgcctcggcccggatgttaattatttcaatgaaggcagcgcttgacacctgcctcgcgttcttgaaccatttcccgctcttcgcgttgatgctccgcgtgaaagactcgcgacggctaccaggaggtatccgatttgagcttcggaatgaaccagacaagaacacagcagacagggacttgtctgcgctggtttcttacatccacctcgaggtatgttacatatccaaccaaaacatcgcctcagaaaagctgacatattttttagtctattcccctccccctacgtgcaatgttcgaccaatacttccagctgggccaccggctccggaaacactacctcgcacctcgcgtcatcttctgccttataaccggccgatttgtgccacctatccatcgccgcaacctctatagcatgcagtacagcatgctacctgcccgtcgtgctggtatggtagaggtgtggacattgctcacacagccgaagaaaggcagtggtggcagcagtggctctggatctatgggtgcaggcattggatccttgagtaacccaatagcgaaagttccagcgaatttcgggcagagtgatcttcggagacggggtcatcgctgatacaaactccctcttgtacataatgccgataatgcttttatactaagataattctctaatattgccttgctagaataacatagaatggataaagacactcctggggcataatagagatatatattagatagaacggtctccaaaagaccacaccgttgaacttttgttcacgaactgtaatggccagtgagttgtatgtctagcaccagcctaaagataactgcgtacataattctagagcaactttaatacgaaatcacatcactgaaaacagaacctccacatcattttactacctttccacacgtttatgtagatgccgcctctgaatcagtatgtctctccgaccaagacaggaacattgtgaccacacgagctctagtttttgacgcgtaacatacctatcttacgggaaacagcttaccgtgggctacggaaggaggtcatctattgggagatccagctcatttcgtccttccgagaatggctttgtaacacaaatgggcagagcagctataacttgactatagacagacgggagctttgccattcatcccaaaccagtaagcattctttcctcaataggtatattgacaacgctaatactttgacgacaaacagcggatacagtcgcaggaggttttgacttccctctgaatgctcaagataccagccctagtaatttcatcgcaaacgccgccacaatagtgggcggagaagatcacccggagtcgatggctttactgtcgtcagcttccaatggcgtcaaggggacatgggtcggtgtggattaccggattgggccagtagtgatagaaacaacaggccatccaaactgtgaggactgcgcacctgggtaattgaatatactagttccatcacaacaaccggcaggtacggcatgtggggaaataacggtctgggggccttgagggtgtgattgaactgaggctctcaagttggtgtaacatgagacgaacataagcggatagaaatatcagagaagtcactgtaattatcagcttattctcggtctggtctgattttctcccccaacccccttcattcgaagctaggtggtctgtacaggtgtggggatcattgctagtctctgtgccacttcggccattccagcgctccgccagacccggtataccgcgtagtcaccacgttcgtctttaggcccacaaagattgaagatgttctgtattgcctcatctgtgatttggtttccatccgttgagaaaaaaagtacaccactctcagtgaggaaatcaggccggtcgagaatgacaaaaaaggtacgagatggtacggcatggctacctcactcccgggatataactttgcattcgatcctgcgggaaagtccggccgtcttggtgaaccgatcctatagctacctccggtcgagatttcatgagatcccggtgcgatgctaggataacacctagggattgagatgctgagaagaactcaaaggtgattgtctttcagcgaggaattttattgatgatcgcagcagtagaggcctgcgcaataggcataagtcctagcccgagttattgatgaggaaaagcgatatgaataatgtaccgaagggctggttctggtactgttgttgtaggatgcgatgtaatgacgacagacccctcggaaggtgattgtaaattgaaatccccatgacgtagtgaattggcttttctatgtagcaactcgatgacctccggcgctggaggctgatatgctaaggatgggtctccctcatcttcgtccaaaccataatcgaactcataatccccaatattgcagtgactcagcctagctaacgacgatattgtccgcaagttgtgacgcattgttcggcactttcgcaccacgagttcttctctttctgaatagacaacacatccatcggggattgttgaaggatcaaagctaaatggggagaaccactcaatccgggaacggagatcaactttcgctctaagcggaaaacccgattgaaatttacccacggcggacctgattcggcttcataatccggttggccgctagcacggaagctataggatgtaatcactaagagaaacccttgcaaaagtcggtcctcgttgggtgccactttggcaataccaggaaaaagcccttctcccgggaaattattctttcggtgaagaatctcgcgtctttgatgctccacgcaggtgaatacatcaggctgaggaccgtagatctcaaatgacagttggggatagtcatggatcctcgaagagagatatcgacaaagagcggtatattcatgctcggcgtccaagtctaggtggacggtactgtaaacctggatggcgatttctggaataggatctaccaaggcttcagggttggtcgcccttttcgccatcaaaatcgcaggttggtttgcatggtctcggtaccgttgcgcattccatttcgaaagcggagccctccaccagtctttgatcctagctatcgcgctgtttcttctgtgggatgagaggggacttccaaggttggaaggctaaggcgctgaatagcaacgcacgctcccatcccgatgtcagtcacgtgagccacaagcgagcggtagttaacttgtatgtaataacatttgcaggcatccaagggaggtcgcgtcttttatacaatgtaggttgatggcgtagtgaggcgctaaatccaaaaaggcaaaactaactcgaacaggcaattaacaggtccgccgtttacatggaagatgcatggtatcgctgaaaagaacaaatggcgccagagccaggctgcttttacgatcatccgcgaatcagggcgattcatacagggatttagatgttcctcttcaagatttcttgaggaactctgcatccgtttcactgctgccgctctttcgggcatcatcgaccatggcgtcaatgccccgttccttgagaactttctataagcattacacacctctgtcagacatcttgaatatatagagacacatagaggacatatcacaaggcaggacttacattcaaacaccccttgtagttcttaaataatgcttcgcaatcattggatgaagtgttgccacgcagatattctgttctaggattagctgctgctgtcatcgaggccttttattgaaggaaaatagtagcatactctcactataccacttgaggaagcaagtgtcatatttcctggtatatatattagcttttggttaacactttgaagctaggtatgttcactatagctcactctttgatatcgttacattcgggggcgatagaagccgccatattggacgtaataggagatagtttatcagatgatatccggcagaccttatacttttcttgctatgtcgaactgagtatattgagtattttagaggaatgagaggaaaagaatgcggtgacaactcgaagatcggcggaagtccatacaaatatcgccactctgggaaggcggtcagggcgggcctaccatttctccattgacatttttttcgggaccttgaatcttcatgtcactactgtttcgcgtttcttttcctcattcttcctttcgctagatttagtgaactggagctctgcaagtcatcatggactctgcagaatttgcaccgttccgggagaagttaacctccgctctggtgcaggtgacgcgaactgtcggacagctctcatcggaagacctgaacttccatcgcacctccagcgcagaattttctgagtcgctagatgaacagagcgcgcgcatcattgcgctaacctccgccgttatcaaagctgccaccgcgggaaccgatgtgactggaccaacccttcacgatgaagattccgtcgaggacaattggcgtggcgtggtggatgtgattgactcgcttttggaaaaggccgatgcctgcttggatgaatttactggtgtgattaagaagctcagcccttcccaggaagaacgtgcaccgatcaagaaagcgcccaacttcccgactatttacgattatggcccctccaagatccccaagccgcaattgctcttcgatcgcaaaccggataactctgatatgagcccctttaagcctcttctcaagtctaagcctcatgcgattgtaccgttggagaaatgcttgaagacgaagaagatagaaggtgtaattggttatcctcacccttatgaggcggagattcttgcttcagagtacccgaagccggtctatcaggtctcccctccggttgagtatctgccttttgagagtaccacggctactttcgtcgataccttggatggagtgaaggaaatgctgaaggagctcaagaaagcgaaggagatcgctattgatttggagcatcacgatgtacactcttatcacggtcttgtctctttgatgcaaatcagcactcgggacaaggattgggttgtggataccttgcgaccttggagagaagagctgcagatgctgaacgaggtttttgcggacccaaagatcttgaaggtcctccacggttccaccatggatatcatctggctgcaacgtgacttaggcctatatgtggttgggatgttcgatactttccacgctgcatctgcattgggcttcccaaaacgaagcttgaagttcctgctgagcaagttcgtcaacttcgaagctgataagcggtatcagacggctgattggcgggctcgtccacttccaccggccatgttcgactatgcacgatcagacacgcattatcttctttacgtctacgaccgcctacgaaatgacctgatcgacaactccacggaagaggcgagccacattgattacgttaacgagcggtctcaacatgaagccttgcaacgctatgaacgtcctgtttacgatgccgtcaatggatatggccccggaggctggttcgatatgttgtggcgcaactggagccacctttccaaggagcaattcgccgtcttcaaggctgtccaccaatggcgcgatgaagtagcgcgcacggaggacgagggttggcagtgtgttttccccaagcacatgctcttcaagcttgccataactatgccggttgatttggggactctattccgaaccctgtcacctatgactccgattacgaaggaacggtcacacgatcttttggatgttatcaagcaagccaaggttgccggtattgatggtccagaatggcgcgacgtggcaccccctaaacacctcgcaagggtcctagaggctgccatcccggaagctgtcgatttccccattgctgaacgctatgaaacgtctcaattttggggcaacgtcttggaagccagggaatcacccactcccccagaatatgcgcttgccgccggtgctgaggctatgcgcctttctctccccctgccacccatgccgacgaccgtctccgaaacccgtgaccacctcggcaccgcaaaacccgctccccttaagcccacacccgctccccaggagccagaggagaagaagtacttcactgtcaaagacctcggcggtccccgcaaacgaaaggtcactccaatcaacaacccagagcaagccctctccatcgcagccgacctcgacgacacaagcaacgaccccgactccacgcaaaagaaaagcaaaaagtcgcgcagggagaagaaggccaagaaatcgaaatccgaccccaagcccgagggcgaggctcccttcgactatggcaacgccgacgccgtcctcaacgcgccgtcttctgccacagtcgcgcaccctcgcaaaaaggcttacaacccgtacatcaaagcgttggaagccccctcaggcgcgcggaagatcaagcgggaaacccccggtaagtctcttacgttccgcgaatagacggttagtccgtcaaaaaaaaaagcatttacgaatggggttctggttgggttttctttcctgttgtttattgtttagattattgttagttagcatagcgatacccgtcagttggagactctgggattactgtatgtacatgtatagaatatcaggttcttctcggcaaagagatagtgtgctattcttgtaaaattaatgtttattctatttttgctttttcaaatatttctcgatcaacagtaattccgcttgaaacaccatctgtctttgatctagatccacgcgatagttagtaaaaggagactatgtttcactaagcccaagcccacaagttttctgggtctaagtctaggttggactccgtatggggtagaagtcaaagactccgcattgaccattccccgctataaaaagcaaatatgaaaagaaacatcaataaatgcaaagttaaatgaatcgcaaacgccaacccgggagcataagtacataggtgcgtactttgtctggtttcccgggactttttttcaacgggcctaaagaggcataatgggtgcgacgatcgtatccggtttgatgggttcggagagtaagataggtgaactcgacataattatatgcgcagtaatccaatccgtactccgaacagcatagcagaggatgacatgcacacacccactgccgatccctactatatcgccgatgataacagctgaagcctgatggtcatggattccggcataagcggaaggattcctatccgagcgcgaattagcggaagcccggatcgctcaagcgggccatggatgtctaccctgtttttttgtagtacttatacacagatggattttatatgcaaacactagccatggatggaagtatgtggtgatacatatcaggggttggcaagtgatctacagagccttggcgcgtttcataacaggatgggatgcatattggcccgtgtgaatgatcggccggatgaggatgatattctcgagggagccaaaagccatgaagtcatgtagagccatgttcggtaatcttaaaatgcatgtctactttgtacatctgcatgtgtattatgtgtagtatgcatactacatcccacatgcatgtattgataaggggaagttcgcggagagaatcaaactctctctctgtctccccccactcactccactttttccgttcaattacccctgagaaagaagcatagaccaggaatgcactgtcgaccttgaatttataacgtccgtgtcgagggattttgggggaaaaaaacctcaaggtggattcagtgcacccccgcatagtttgctttctaatgctgatatcaatttaaatcaatcagcccagttccgcatatcattcgatattcattggataacaagaaaaaggcaacttggaaccttgaagactcaaagtttggtttcttcccaggggttgtcccagtccactggtactgcaaccccaacccactggttcaatccgggactacatctatgataggagaatatcgcagagaatatcaagaatcaaataaaaagtaaaacatctacaagcatgtcggatgtagccgagactccgctatggtctgagacaacccgtaggcataccacggatgtatattgtacatcgtatgtacctaagtggtatgactcttggaagaatgaggccatagtcaactaagtactgaatgtgtacagaagtaccgaatacgtgagaagattgattacgcgtaattaattgataaggccatactccgtacttggtatgggctcaacctgaaaccaggttgctgtgtcgagtagtttgcgagtattgtatccatattcatatattaggattcaattctaatctacggacaatatatatagacatcagcattcaaggaccaagtaacattcccgagacatccacatggaggtctcgtgggcttagcctgaacggttcaagtcttttacaatatagacgcaggtaccggttagcgcaacccccctgcagacatgaaaccgtgtcaccttcctgtaatacatttttattgggttgtgttatgtatgtccttgatgttattccttttctcgacccgttaagaaatataaacagagagatctgacgtcaggatgttctatgattgacaagtaaaacaagtcaaagtacggcttgaagttagcgcgcatgggccaaatcctgaagacaaggatgttgatcgagatcttcctaacagtccagggccataatctccagaaaggagggtgttcctaatagtggcgaagtgcattgggccaggggtaaaaaaaaaggctgtcccccttgcataacaagatacgtctcattcccaaatttgtttttttttatagaagagagagaatatggcagtaaaatgaaatagaaattaatacgaaataataacacaaaagataaagcagaaaaatacaaaaaaaccagttccccagaaccgccctaacagcagactaacgaaataaataatctcccctctttactttacttgaccctcaaccctcccccccctccttcttcttcaccttgatgattcttttctttcttcattgattcaccacagtaccgtggtaaatcggtctcgaaaaccccatatcctcggtacgggtgtctcctcttttacggccccattctctatcctcaagtccctacgccagggtcatcgcagtacatagtcaactctgacgatcgtcacccccccctaataccacaatgtccgttgcgacgatgctacaacccgcatccagacagtcacgggcatcctcgtcctcgtcctcctcgtttcaacccgtggcacggcataacacaatgtcgtcgcacgatactcggtcgctccgccaatccaagcggatgtcggtcacggctctgtacctttccatgtccgccaaagatcgagacttggagatttccgatgacttggcacgaggtacgaattctggcttatccctaatggtcgcgctaatcctccgacagcacagaagcacctgcgcgatttgaagtcgaggatctcctcgcaatcgaagaagaatttcgtgttggaaaaagatgtgcgatatctggactcgcgaatcgcattgctcattcagaatcgaatggccctggaagaggtaaggatcctattttcgtggcaatcgacacacatccgctaacctgtctttcggtccagcaaaatgaagtcgccagccacctcgacgatacggcagacccgcaggaagggttcttcccgaacgatgaacgaacccagaagtacggcaaccttcttttcctccttcaatcagaaccccgtcacatcgcccacctctgtcgactcgtttccatggctgagatcgattctctcctccagaccgtcatgttcaccatctacggaaaccagtacgaaagtcgcgaagagcatcttctgcttactatgttccagtccgtcctcacctaccaattcgataacacaccagagtactcgtctttgttgcgccaaaacaccccggtttcacggatgatgaccacatacacgcgccgtgggcccggccagagttatttgaagcaggtgctagcagaccagatcaactctctgattgaattgcgggacgtggatctggagatcaatcccttgaaggtttacgaaaccatggttaagcagatcgaagaggaaactggctctcttccagattacctggcccggtctgtgactgccgaggatgctgctgaaaatgcgcaggtgcaggccatcatcgccccacgtttgaagatgttgacggatatcgcaaacggattcatcacaaccatcattgactcggtagacgaggctccgtacggtattagatggatctgtaagcagattcgcagtctgtcccgcagaaagtaccccgatgcacaggatcaaaccatctgcactcttatcggtggtttcttcttcctgcgcttcatcaacccggcaatcgttactcctcgctcttacatgctgattgatgctacgcccacggacaggccgcgccgtaccctgacgctaatcgctaagatgattcagaatctggcgaacaaaccttcctacgccaaggaaccttacatggccagcctacagcccttcattcagcaaaataaagaacgtgtcaacaaattcttgcttgatctgtgtgaagtacaggatttctatgagagtcttgaaatggacaactatgtggccttgtcgaaacgggatcttgagctccagatcactctcaatgagatgtacgtcatgcacggtctcctagagaagcacagtacatcgctagcccaagaccaatactcgcacctgtctctgctgctccaagaattgggtggagctccccctcaagttccccgcaaggagaaccgcaccatcaccgtgcctttgtttagtaaatgggagaccgctctcgatgatttgacagccgctctcgatatcacccaagaagaagtgttcttcatggaggccaagtcaacctttgtccaaatcatgcgatccctgccacagaacaccttagttgcacgccgacctctacgcctcgaccgcattgccgaggctgcagcaaccttgaaaaatgatgccgtaatggtgcgcaagggcatccgaaccatggaactcctcagccaactgcaagacatgggcgtgattgaccgctctgacgagtttagtttgcttcgtgacgaagtggagcaggagctggtgcatctaggctcactcaaggaaaaggttctggaagagacgcggaaactcgaggaagttttcgcgactattcgcgaccacaatgcttacttggtgggccagctggtaacatacaagtcttacctccacaacgtgcgtagtcagtccgaaggcaagaaccgtggcggcaagacgccaaagaaccaggaacttggcccgtacaagttcacccatcagcagttggagaaggagggtgtcatccgacgcagcaatgtgccagaaaaccgacgagcgaacatttacttcatgttcaagagtcccttgccagggaccttcgtcattagtctgcactataagggtgagtccttggatttaatcttcgaggaaaacggaacatcattgctaacgcattatttaggacgagcccgtggattactggaacttgatctcaagctggacgatctcctggagatgcagaaggataaccttgaggacctcgatttggagtatgtccaattcaacgtcaccaaggtgcttacactcttaaacaaacgatttgcacgaaagaagggctggtaagggcgctatacaccccaggctccccagagtccccctttgatgaatgatgagctcgagcggaggtcggacagctccccctatttggtcttccatatttacttcgcctgctcagccacctgatgaccgaccgtgccctaggcgcttaatcttgcgatgaagatggacaaatatgtcatgcctctccatcccaaataatagatcggatgactgctctatgcaccgactgaaatctgcccatctatgcagttcgggcgaatgccctttgtgcgtgtcgccgacacgcatatactcttaatggagaatgatcaaggccctctccccgctggtacgggggatgtcgatgatcctgtgatttgtgtcctttcccctatcttttcctattatgcttgccattcctatgtctctcatcctttcaatgtctatacccagcgcatagttgttaccatttgtttttttcccggtttcattgggggcccgagccctataatcccccggcatgtccttctgttttgtgtttcaatcaccgcccaggcctgtccggtctcatgcgctgtgtataataatgcctatttgtgatgctgtttgttgaattgttttcaattgaatacccgtatgttatgttgtgaatggtttatttccccacagaatgcctaggcagattacaattcatttcgggactggctactgtgatatatctgtcttctttcgtaaggtctaatatgtcaaatgctggtgtccactgatagttatagagtggattgattcgtcactcgacacctcgacaccgccacgtctgcccctcgcctgcttgccccctttttctcgagtggaatcttcttttcaagtatgcgagctgtctgaatatcaaatttaataaaagaatagtacaaatttggagtcgggaacagacaggaagtgctatatattctatatatgctaggaagtacatacaatagtcgatcctttatacccaaatgacaacccaataactcaactagtagtcgacttgcaaaatgacgatagtattggcccctgtaaatccctgggaacttctttggcaaggtggttttattgttgttcaataattagaaataacattggtccctagggatcccccaggcttttttttatcataaaagtggccacttacgctaatcccctccctccgcctcccgctctttttccagaacaacaaccctcctcttcccttcgaccatatacctcccatcaatcacaatggcggccacagaatcccagttgcctacggatcctaagtacgaccactacgacttccccaccaccgctccggaaacgcagcctggtcaccccggccacacctcccccgagcaggatgcaaaggtgcaacagctccgcgctgagctcgaaaagctcggctacaccgaacgcttggatacgctgaccctcctgcgattcctgcgtgcccgcaagtttgatgtcgaggccgccaaaaacatgtacgttccttgattctcaaagggcatggatgtttgttttttggagtagttggcagaaagctttctattccggaatttcttagctttcggctttttgtcgaggcctaattgtctaacttgatatctcaggttcactgcaagcgagaagtggcgcaaggagttcggcaccgatgatctggctcgcgacttcaactacaccgagaaggaggaggtcttcaagttctaccctcaatactaccacaagacggacaaggttggttttctgtagcttatacgtattcagatgcaatactgacatagtcccaaacaggatggccgccccgtctacatcgagaagctgggcaagatcgacctgaaccagatgtacaagatcaccaccgccgaccgcatgctgcagaacctggtgtgtgaatacgagaagctggccgacccgcgtctgcccgcttgctcacgcaaggccggcaagctgctcgagacctgctgcaccgtcatggacctgaagggcgtgggcatcaccagtgtgccgtccgtctacgggtacgtcaagcaggcctcagacatctcgcagaaccactaccccgagcgtctgggcaagctttacctgatcaacgcgccgtggggcttcagcagcgttttcagcgccgtcaagggcttccttgaccccgttaccgttagcaagatccacgtcctcggcagcggataccagaaggagcttctgtcccaggtgccccctgagaacttgcccgttgagttcggcggcacttgcaagtgtgagggtggctgtgagctctccgatatgggcccctggaaggagcctgagtgggctcgtacccccaagtgggccctgcctaaggaggagccccctcacgctggtgagcttcttattgaggacgaccctgcacttgcgaagaaggatgtcgagggccaggaggctgctcagactagcgcctaagcttgctgagcacgtttccttgtcttcttcgttggagatccaacaagccgattgacaatctccttttatatggcgactgaaaacagacacccagatggggatgctggaggtttattttcaactccgatcaacctgaaaatctcaaaaaaaaaattatctggcggttcgacaacccccaatacaaccccaattccacaaggcaaaccggaatttctctcttctggtagtttcaacacctctttcccgatccatccacagcatgtggacccttaccctacattcgctttttgcgtgtgctttttttgttccgatctagatatcatggagagcttgcttttgtttttgcttttgcctatcaagataagcagcgtgtggctgccactgctctcagtatagaagggacaggacgcgatgaaatttaaaagcgagttggtgtgaagatggtgtttatcttggttgtttctttgttggtagtgtatacacgaatgagcacatattgaaatggtagctgtcatgtgtaggacactatttggtttttgttatgcttatgcttatgatatacgatgtagtagcagtagcagtagcagtagcagtaggagaagtagaaaaccaacaatatttgcctttggtatagagatcgtagacagagtttagtctgaacatgaaagacgatatgtaggattttgactcaatggagccatcaagaagaaaagacatggtatcatgatccctaggacaagcccaggccccccaaacgcccccaacaaattgcaagcataaaaagaaaaaaacgaagaagagaacgctaatcaaccaaccccaaagtcctcaaggcaatcacttattcatattctccacaacgtcagcagcacggccagctctctcagccttgcccaccgtcgttgccaacgcattaccctccacaccggcctccgtatcagcattgccctcgccctgcaagcggagcaacatccgcagagcatcctgatagacactcgcaatatccccactcttccaccgctcctgctccgcctccgtcccgagcgcagcctgcaacgtccacgccgggtcgtactttgcacgggcctgggcccctgtcctcaccgacccagtgccgttcgggatagaatcaatatccataccatccggctcttggccgggtattgtgttctcgttttcattattcgattggggctgcagattcgtagattcgcccatttccgtatcgttatcggcatctttccccccatttccaatcttgtcttcgttttcatattcctcttcctcctcttcaatcatcttcttcaaatgcgcggcatattgtttcgccgcacgtctcggcgcatcccgcctctgctgcgcgactgtcgtgtttagagattccagctgcgcgtacagcgatgtcacacgcgacgcaagttctgtatcgtatgcttcgtactcgatttgttcagtcggcgcggtgaatgctgccgggaaagggaactgtggtgaggtggagtctatgccgttgatgctgattgaggttgaggctgattcgaaggtttggtttatgtactatttgaagttagagtctagagatacgtggatttacatgttgttctggtctcacttcgtcgattagctcccggacgcgttcgcgcatcggatctggggtgtcattatccgttgcagaaggggggaagtagaggtcgagtttgcggcgcgatagggcgactgtattggcgtagaggtaggtgaagtctgctggagattgaagctcgacttttcgatagtgtggtgctgccatggtgggctcttgtggttgttgatgtttttctctgttccgatttgtaggagaaatggccttggcattccaaggttcatccccgcaaacgatgtcatcgatgttgcaccaacttactctccaaggttgactttttttgctctattgtttcttgttttctgctatttatttctttcgttaagataatttacagataatctacacttcttcctcctcatcttatatccttccttctactctgatacgaccccttgagataatgcaagtgcagcatactcagtgatattctacactacagggctcgaggagccattgggacacatcaccactatcctagacattcctttacataccctcacaccgaatatggagaggtcgacttccatttccctcgtggataacaccgtcccacagcaacccaccggtgaaggacctccaccgggcacatcaactcatcaccacaaaagcctgacgaagcacttgagccgtgcatccgtccacagccagctcgcaaaacggaaatatgcaaaatggcaaccggatagacttggcattaagcccgacacgaacgactcgcttagccgagaatcgtcccaggtgcgcggagactcgatatcagcaagctccaccggagaagccagcgggaccggagatattgagacagctgacattgccccgtcgcgagtctcgactaataatgggagcggcaacggcagtggccaggcgaccggaataggagaccaatccaacggccatgaggacaccaaatcccgctcagagatggacgttctctacgagaaccagcggggctggttcgcttttggtatcccacattactcgcacagctcactgttgaactttgatcccagcccctggatgactcgggaccgcagagtcagtcctgttaatatcacaaatgcccagctgcctgatccgagctgggagtggacgtggaagacatggtatgtcgacatgtctggtgataccgatgagcaagggtggcagtactctttttcgtttgcctcgtcttcgtggcatggcacgcagctgtggttccattcgtttgttcgaaggagacggtgggtgagactacggactaaggcccatccacggcgaaatcgtgatcgctcggacttcgagaaagcccacatgcttaatgaggactattttaccattcattcgtccaaggccagaagtcgggagcaaagcaccgcaggactgtcccgggtggacactggattcttgactcatgctagcgcgacggtcgatgaggagtcagatgtcgatgagattgcggatatacctagtttgatgcatgctttgaaattagcctccattgatcgagagaggattgatgcactgaagaaatttattgaagttggaggcgacgagctctattatctgaacgacaaggtgagctgggtgatttcctctaatctatatgttgagaccgggctaactctattttggcatatcagataccagatataatgtccatgttcttattccagacctcacgctggcaatttgtaacatatctttctgatgtcattcgcgggctctccaaaactcccactgattctgataaagacgccgatgcagtccaacgcaagaaagacaatctcgcccgtgccgcagaatcctgcaagcatcacattaccgggccggatttctttaaagatgatcatggggagtcaggaacggaattgttagacttgactccggtggccaggcatgatacactaatggctaagcgaccggtcttgaaggagcgtgtgaggtcgatgaaacggattttcaagggcattcccaaggccgctgagattggccatgaaggacacatttattaatgtattaaaagctctctgtatagaccaaataaatgttgttattgggagaatcacatagcgaagtatagcagctcacccggcagagccaacctccggccaccgcctacccgttcggcggctagcaattttcggggcaaaaaggtccatcgaaaaacacctcagcaacgcgcccaattctactctcctttccattcatgtctccggtgccattagagcatcgtcccttatgctcttgcgtggccgcccgtgtctaaggaggcgtctttctgccgtcttggacactgtcgcgactggcccgtatgagcctcttctgtttctatatcctcgctgggctgcgcctgctttgcaacgccgacagatatcttccctgaagtcgattgatactccagcgaggataggacatacttccagtggcccaattcgcgcagcagtccgcccttctccttcgctttctcggcactcgcgccaatggatctcctctgtgtcttccgcccggtctcccgacgagtcaaatctgcacccgtcccctgcggtggttggagagaattctaatatacgcaagggcaaagaaactggctccgatgatctgaatgaaagtggtggaggtcggctctccgcaggtcagaaacaatctgtcaattcccttgcagatgccgaacacgccacttctcgagaaccgctacggggcttcgcgttgacaagagcgaagagaatacagcaaggtcgactgcataacaaacccctgaacgccaaaccttcgtctcccacacagagacagctttttttacgaaatacatcaattcgagatcggaagaagttgcggtttcgcgaatatatgaagaaaaaatatcaatctcgttcagcaaaactcttcgacaatgcttggtttgatacaaaggagattctggaccaagtgtaccgcgatatccggaaaattccccagaagagtttgaacaagaaggagatacttgtaccagaggagacccttgctctgttttctggtgtaacccgttataccctgaaagagaatatttggtacattccgctccacaatggatgtcgtgtgcacatcctacctgcaagtcagagcaagggattactccgtcgagtagttttgagtgccaccgaccatatcatggcgctggtggaagggcattttacccgtgcacagagcttacaagctatgggagatccactggttgatattcacaaaccaccggttccaatgtgcatttctcggggcgcgatgcagcgttcgaagctgcctgtaccgttggttcgtggaaattggcatttcggtcaaacatcggatagcagctcgaatttggacgagatcctgctacctcgtccggttatcgccaccgtgaaggagtttaacgagcacatcgaggatgtcacatctgcgagacaaccaacgctcgatgagaaggccatgtctctatcaaagcttccgcacctggtccgggttaaacgacatcttgaggcgctattcatggaaggaacatactccaattatatctcgactgcggctttaaataatgcactagaattcctttgtcggcatgagttccttcaaactgcccgatccttgttttcatgcacagagcatgtggctaccactgatacgtataacatcttgttgcgagctgctgcgcggcgtcaggatgtggctgtctttcgtcacttcctacgaatgatgcctcgattacacatgcgcccaaactcagaaacatggctcgcattgctcagcgccctagttgaccctagcgaaaaagcccaactcattgaacatatggttcagcgtggccacatgtccaacctttccaccatccacagcgcgctccaggagacaatccaagattcgcttctagtgcatttggacagtgggcaagatataggctcattcattggcctcatgaccaatacatggggtgctaattggttcagcccttccattattggccagatgttcagtgtgctcgctcgattgaagaagttcgattccatagaccggctcatggaaatctgcatcgacaacaaactcaccgttgacagttatccactcggccatatcgtgcaagcgctgggcgcgaatatccacgtcgctttgcagtataccctgcggttcttcgagcacccttcgttcgaggtaacctcacaaaattgggaggatttgtttttggctgccttcaggcaccgccagtacaacatctgtctagttctatggcgatattcttgcatgaaaagaaccgtgacctacaagatgaaacaggctgtcttaacttccttatgtcgcaatgcatcctttggtaaacccacgagactcaacaaagatttatggagttccgatgccggcaaggtcattatcggtatcgaccaaaaccatgaaagctacaggctcccagactctattcttgacgatataccttccgagttccgtcacaatcctattctctacctcatcggatggaagcccaggggtgaacagcgtgatctccaaattcgccttgccaatgccctcattaagcgtgacatgattcttggtgcaactcgctatgtcccccagcatccttccccgatcatgctggatgcagcgtccatcttagatcaggaatggcgtggtgtcccgcggcctctgacttggaagatgcaaaacgccattcaagttcccatcgtccgcaaagacaaagaccgagagcaagacaaaaacgaagaccaataatctcccaatcatcctcccctttgcatcctcattcttcgatccttctaccttttttgacgctagcgtgttgcatgaatatcccttctggcgggcttgttttggctggtgtttgttttctgtacgctagtctgcctactttcccgtcaccttgtatcgtatacttgtacattatttggaaatatagaatcatagagcttcaatgtccagaataacgccatctgagtatatattcattcaatcgtgagcgagtacattccctctttcaaatataaaacccctcaaaatctaagcaatgcatcgagatcattcataaaactattataggcagaaatagggtcttcaggaactctctcttcctccggtgaagcaaggcccccattgagaatttcagcttcgcgagccagcgcgttctcccacccaatccttgtctctgcaggcatcggagacagagaccgagactgggaccgagaagcaggtatgctgatccccttcacctccacacaatccgtatataaaagatcagactcaaagctcccgggagaatccagcactgacgaatacacatcccgccttctctcattttgtgcagtttggcagtgtgtaatgcctcctccaattccaggcgaatgtggggaagtggaagtagaagtagaagtagaagtagaagtgagggaaggtagtagccggcgcatctcggagtagaacgaatacatcgagctccaagggggtatatcgtgatcggtttcttctggcagatagctgttgagctggagttgaggttcgtgtttattacaagctttctggctgttgtggttgcggttggacaattgttgccgagtaagtctttccaacagttttgtaagtcttgctagtatctatatttttcttccttttaacatacctgtcaattgaatctcgcgggatgcaggcttgaccttctttgcggcagtgggtgcactgtttatatggtggggagatgtcacatcgctttttccgggtgtggcaggccacgcaggctatcttgccaggtcgacgaccttgcttatttgcttttgtaatccccgatgggccttggagtcgaattgtgcttaaatccattggagcttgaatatgaggattctaaaatatagacgtaggtgggctatatatggagaacgggtgctccacacttttatgatgatccagacttaccccaaaagccggcacaaccgtgttggacgttccaaattggggaaatccagaattggggaatggccaatttggggaaatcgacctcgggagaaattggggaaatctagaattggggaaatttccaattgtggcccatatcgtggcgattgacttcaagagttcaatgttacagcagcattcctaatatacaatttcgtgttatatcattccgtatgtgattctaatttcttctcatgacttattatgtatgagtcgtaaggtcaataactactactccgtactttggactatatcattctacgctaccttgctggatccacatagaataggagtacagacacatgtaaatggccagaaagatcgacacaggtcttagattgtttgcacaatcgcatttgaatcgcagttttcagccacggcgccgggagtgcccgtaaaggatagacaaccctggagatcatgactgatctaaaacggaatgctacacctgggaatgttcctcgtataccatgtatagattgagtcttgttcataacccaagagcatactgttggaacagtatattccgggctcggtgcatactacctactccgtagacacggcatgccgagaagcggtgcggggacattggcttttgcctcctttccgttttatcaacgtcatctatgatcttctaataataaactcatgatgattgcatattctgctacgtagtgcaaattaccctagagccacctctccaatctcaccgcatatgcttctccaagcacttcaagatttgaaacatttttgtacccaaagcgacctcgaaatgatttcagagcactttgaatagctctatcggtgctagctcactttcctctaactccaatatagtggatctgtcaagtgtgatgattcaagctatcaagctaggaagaacctgctcctctatggagtgcctttatttccggtgtatatatgtcagaccatcaacacgtcttttggacaacggaatggatatcaaccagtcggtgggccatggatccccgaattttgggtgagtcgagctgtcattggtccaaagctgcctccttgtgacgtccaatggttcaatactaatcccttgtaccatgtcgagatgataatatgcttcttgatcacggagccgatcctaatcgtcgatgtaatattgaattccacgccactctcctacgctgttgaacacgcttctttgccactcgtgagtctgctactcaatcgtggcggcgacattacagaagggcaggttttgcaccacgcagtttctcgcaactccgatgcagtggagctcccgaagctcctattactcgatcaacggtatcatgtatcaatgccatcggccttcttgggacatgaatttcttagtgggggaaactgttctgcacaaggcagtatttctttgcagattcgatgtcatccattcccttcctagggagggagtgaaccctaacttcaaagatgtcagaaactgaaccgtcatacaatgtgctgatgaaaatatttggaagaggatcccaggatgggcacaatactagttgaggcaaaggtcgacataggggacagcatggaaatacaagtacatatgtaggtattgcatccctcttacatgacatatcttcaatcaaaccatattagctattcggcacactgtttaggcaatttgtctttctatacaatataagttccacaaggacgccagctctcgtgagttatatatattctggtcatttcccattatcatgacatatcatgccagcacagcttgacagagcaacgagttaagttcaaaacgctgcttacaaccaaaaatcaaaccaatgaccccatgtttgcatgagaatgcccttcacacctatcagggagaccgggtactggtggtggaagaccatagggatcaacaagtgccgtccgaatcgcacccacaccttctttaaggtagagcacaagccggtaggccgagttgccgttcaagtaatatcggtggagctgtttgctacgcaggaagcccagccgctcgtacagtttgatcgcgccagtattggtgatttcggtttcgaggacgatctgcccaaacacatacaagtcagccacaataccctcgagaccaccctatttgcggaccaatagccacctccactgtgtagacctacctcatctgcatcccgctcgatcatagcatcgatagccatgcgcactagcttggttgcaattccccggccacggtactcttcgcgcacggccagcatggcgatataacctctcagcgggccgtcgcggtgtggctctagcttcgataccacgaccccgaccatctcgtccttatcgtccatcgcgaggaaacacaggtcaccccattggtataagaagtagcggtagacgtagatgctgtaaggttcagacagatctttggagatcagctggcgcattgcggcgacatactccttttcgcgcgaattttcatatcgcacgtagcgaagatcgggagcattgctcatcacagcgatgtcattgaagtgggctgatggttggagttgacggaggggacgggggtgggatgtgtccgagaggaaagttactcgcagccatgtgatgccgatccgcccgttcgcggacttatgcgcttccgtgtttttgtatccccttccttttcttcctgctttctttttcttcgaatttgtttgtcttgttcttgatattgatttccaaggcaaatcgcacccggtcctctccttctactccctccctcgcggttggttgctatgctccgtcgccgcacgggcaaggacggggtcccgccctctaacaaagatagcggtacagaaaccaaggaagaacagcttcgtgcggagtctgttgatccaaaagccacccagctagttatcaagccccggagtaaacgtcgcaatgggttcatctttatgttgggcgggatcttcggcatcttcatcgccttgtttttcgcaaaccagcatgaggtcataagcctggattcgctcatggacctaaatctcgattcatggattgatgctatcccacagggaattgtgagtgacgtgaaggaattctcggtacgtgcttttttcaagggctcttacctctacatctagttaccagttgactgacttccaaccgggttatagcaacatgaacgcgataccgtcagctatgattcgtttgccgttgggctacaacttcgcgccatgggcgtagaagccaaacaccctatcgtgatgatccctggagttatctcgaccggcttagagagctggggcacgggggaaacttcgcgacaatactttcgccgacgattatggggcagctggagcatgatgagagcgttagttatggataaagctgagtggaagaatcatgtcatgctcgatcgggaaacaggccttgacccgcctggcattaagctccgtgcggcgcaaggattcgatgccacggatttctttatcacagggtattggatatggaataaaatcttggagaacctggctaccattggctatgacccgactaatgcgtttacggctgcatacgactggcgactttcatatcccaaccttgaagttcgtgataaatatttcactcgactcaagtcctacatcgagaccgcagtgcacatacagggcgagaaggttacattggcatcgcacagcatgggatcacaggtggtgctgtatttcttcaagtgggtagagagcgaggaccacggaaagggcggcaaagactgggttaacaaacatattgactcgtgggtcaatatcagtggttgcatgctgggtgccgtcaagggattgactgccgttctgtccggagaaatgcgggatacagcgcagttgaacgcctttgctgtgtatggtttggagaagttcctatcgaaagaggaacgcgcggagatctttcgcgcgatgcccggtatctctagcatgctaccaaaaggcggcgaggctatatggggaaactcaacttgggcaccggatgaccaaccaggccagcccctgagctttggcaacctgatccatttccaggagaccaactcatctgtgacaaaacgtaatctcaccacgccagagagtcttcagtatctcctggaccagagcgaggattggtatcggaaccaggttctgggtagctactcgcacggcgtggcacatacaaaacgcgaggttgaagccaacgagaaggacccgcgcacatggctcaacccgctagagtcgcgcctgcccctcgccccagacatgaagatatactgcttttatggcgtggggaaacccacggagcgcagctacttctaccaggaagagaccgacccactggtcaaactcaaggtcagcatggacaccaccatcaccaacaacgagggcattgaccacggtgttttaatgggcgagggcgatggcactgtgaacctgcttagcacgggctacatgtgcgccaaaggctggcgcatgaagcgttataacccagccggcacagagatcaaggtattcgagatgcctcacgagcctgatcgcttctcgccccgcggtggtcccaacactggtacgtaattctttgcttccttacctacctgacctttccccacgatatgtaacaggcgactaatttcatataggggaccacgtggatatcctaggccgtgcctcactcaacgaccttcttctccgtgtcgctggcggcaaaggcgatttaatcgaagagactttcttctccaaaatccgcgagtatgcggatcgtgtacaaatctttgacgacgaatagatcaaatggggtcccttacgactgttctgaatatttgactcgcgttttgatacacttgatacacccacatatgtacctccttttagacatttgggattttttttttctcttctagacggatggggttttgcttacgatgcagcattcttgtacatttctttatgacaaaccccttatatgaacattttatattcctttccatggcaaaccctatttgttcaattatttaatactagaatacccaaacaaaccatgtcgacaagtccaaacatacgtaaatctaccctctcgtatcacggataagcccggatacggtttctttcctagccctaaaaatagggacttatgcaaggccattagctgctacttgtagcaactgatcccgtgtgatcgacagagttattggcccgcatgagaagcaagggcataacgtcccgttcttatcacactggcggggttgccggttctcctcacctcgaacctgaaagaattcggaagctaagttggaggatgctgtatacacatactacactagttcctacaagatgcgtttacaataatagaacccagaaatgtaaataatgtacaatgattcattcatacgctagtgattaaaaataatgctagcaatagttacccaacaggatctcaccgcgcccagaagtaatgataagaggtatgcacacgacccaatccgggtcgtgtagagggtgtcacggaaagcgtagatgtaataggttgtcggatcaggttcatcctcgatagccaaaggcaaagagaatgggtgaagctcgagagcaggtggcctccgtcaaaagtaccaagccctagctgccatgaaactcgagctctgaaaacaagaccccagctttcagtattccccttctttcctttcctcggatctctccgtgtcgaatccacacgggaagaatccacacaatatcgacgccgatcaatcacctgccaggcggcgtggacacagagggaagatcgagacgatcttttcaaaaacccccatgtgccgatgcaaaatgtcgtaaaacagccaattccagaaccccttctagtgcacatcaagtgtgcagcaaaagtgccgaaacttttcatctctccaaaaaaaaaccagtttcttaagttcccaggcgcctatgatgagcgagcgacacgaagtaaaaatatttgttcatctgaacgagccgaaagcaaaaaaaaaggtggctcgcccatttcataaagtcgtagcgaaagacatgggtcagaaaaatagaggggatcgcccgagggcgtccgagaatgtgtacaagggaaggttgacagcggtggcggtgcgagaaattggcgaatgcgggcaggtgaacatggcccggtcccttccgccaccagtattaatattatagacggagttgccagcccaaaaggtggggtagcgaggcatgtacagccagaaggtgaagagtaccttcagctcggggcggaagtaccgcgcgaaccggaggttttattaaaaccttaaggtgttgaagattgctcgatgcagataatgttcccaaacattgtcgtcaaacataacgccgattcaaaagtagtagatgcaagaatggactgcgccgagtgtcatgtgcaagtggagctcaaggattagcgcccggcctcaatatcgtgatttgaggtgagtgtttcgctttcccagttgtaatgatcgtccacggggctcaaagaacccgatgaaacagacgatgaagagcccacggtccactcgtcactgtccaagttgaggtcgccatccaggctggcaagatcatacccggactcgcgggaagagtcaccgacctcaacatagtcgtagtcccagcggaacatcttatcggcctgaactcgaggcaggaatcgagtcttggcatagtagaaggcaaccgtggcaagcagaccaccgcagaccagatcaactgcatagtgatgcgaaagatacatggtagcccaccacatccacagggtgtatgtgacccagaggggcttcaaccgcgggaagacgtggctcatgaagagtgctgccagtgtggaatcggcagcatgcagcgaagggaatgcaccaaaaacaacaggggactgcttgaagcccgaagtgtagagatcgatacccagcagcttgtcaatgcgagcaagaccagccggatttccctgcatcgagtaatcggctggggccaaaccgtacagattttcataccagggtggcgaacaggggaaagccagctgaatgaagacagcggtcatgctaatgtatccgagagtccgggcgtacagaggggtagttcccggggggccgaagaagaaaaggatgagtgaaacgacgaatggcgctccgtaatggcagagtccgtaaggaatccatgccaaaatgtcaagcaccacattttggtgggcagatagaatgttactgatgttggcaccgtacaggatgttttccatggctggcaacactcggacccaaattgcgggccgccaatcgcttggaacgaatctagagaaacatgttagcgatgttgaattcccagcacattgctgctcacgccacagggccatggcaagcgcatatgctgcaggaaacacgagagaaagcaaaacttactggcaaccatagaagaagataagccacccagcaacgggaaggaaaggcaagaagaattgccgggtgattggcatcaggagggagcacaagagtccagtggcgatcgcagtctttccaagtggaccaggagattggatgattgtcaaggagaaaatgccgataatgaggagcaacaagtattggaagtcatacaaggtccatcggtgtgcttgtaaggatctgagggtgtcggcgggcgagaaggaggtttgcaacctcgatatggacgaggcgggcgaaaggcggcttcggagtttggaccggagcttgcgacgcatgcgatgtggtaccaggagctggaatgaacgccatggcacttggatttgaagctttccaaagtgatgctgtgtgcgatctttccatgacggataggaggcgctcatgttcgcggcgactctcctccaggagggtccggatcacttttggaaaaggggtggttgagacttcaaggaatgccgcgggacgagacagagggaagtcgcgtaacggaaggaggtttatcgttgggaagagagactccagaaaaggtgagttgggcgcgaataggaaggcgaaggatcgaggggcgtgagtcccagggaaactcaggaggtcacgttgacaagggttgggatgcaaggaggaaacgcaaccgagagaacccaggataaacagcactcgagaagaccaaggagaccactttagaccctgaagcggagatattaaagaattaaagaggaaagatgggagagaaggaagggaaagaaaagaactggatctcacgaagccttgtattggtattaccagcagctaagttttgtgtaattttaaatacatgtgtatagtgctactttccctctttcgtaggtctatggcgtcactatttggtttgggttttatttttttcaggtacgcaacctggaagtcggtctttctagcttgtcctattgcaatgctgaccggagctctcggcagtattcaataatacagtggacatccggtctgagggtttaactcggaagccacggaagccacggagatcacaattctgggcatatctcggactttgtaatgccaatggtccgatgttagtatgttcatgcagagactccgagactcccgagaacgtcatttatggcttccttatgttgtatatttatatcgtatatcgcatagttatatagatatagagaacatctccatatatcaacctcaatgacctaattctacttaattaacttcaatcgtggtatgtggtttgtaaattaccgagacgaaaatttcgcaaattttccatataagatccatcgccgagctctgattggctgttgctcccttgcccccatcgttgaggcccggtattgaaatccatccgacctctttaatttcgcttatgcacaacttgtaacatcttaccagttcaaccgtcgtcctggtgatcgaaccagctcgcctcatacgaaggcaatcggcccaacgcccaacgcctactttgtagatgctactccgtatacattataggcattagcattggcattggcattggcattgaggaaactcagccccggttatgcggttgagccacacacgatcagcactcaacagtcctaatttgactgacactattactctgtgctccgtagtgcggttttacatgggcccagcgtttagatgaggacgtgccttttctcaggggataccaacctcctgatttaaacagcaaccagtgaacttcgtactccgtacaaccacctctgctgtagaaagagattacactataaaagacgggacagctgattgaatatactttccacccctcgactccgcgtttcagtatcgcgcgcccgcagccaattaccccttgacttcataatctagcgtcaaagctccctggggattttacaataggcagtcgctattccggactccgtactccgtacaatgctccgtatcccgaggcttattattacaatatcttacttgactattgtattcatctttccatcgaatatgacagcgcacgttcgtattcgtatctggaggcggctgcctagagtgcccaggtggacggtcaggcttagaagtgatgtaaggctgatgtgtagagctgcgccacagatatgaagtcaacttgcagtatccccaacctaaggttttgttcgccttgctactaggccttatcgggatttggctgcaggtcaagaatgtaagatatgtgatcttacttgtaactcacagcttcgttgtcaaagatatgcaaatgccagagactcgatttgcgtgcaaaagcccttggcattacacaggattacatgtcacatttaatagctctgggattacgcccgtgcttatttgatacgaccgtttctgcgtcgtcgatcctaccaggctatcatactacgtccccgcaaacccgatgcggtcggtgggggaaaatgactacatacgccgtacatttgcgttttacctcatttcttacgacaaaataaataaattataaagagagagtttacattctcgtagccgtgtgctgtgccaagtataggctaccctgtaatatgtcaaggttgtacatgcgccgagctaattatacctcttttccgaggtcggctaagcgcttctctcgtcattcattgcatatgctgcggccacggagatgaaaaggataataatagaggcttgtgcattctgttcggcgcttagcttgagagtctgctgcctatataattattcgatatatatagtatccaccaccccacgcatcagactacaccgccgagcatacttctacaaatcttcaaagttcacagcataccttctcatttattgcgttcaatatgtcatccacagtttcaatttatgtcgccatcagcgccagcgagggcgtttacaaacactggggtgttttcatcgatgcaccccgagaagaagacaaaatgttcctccaggtggcaggttctgatggtcgattccgctatgagttggaaacaacagacgttcgacaatcggaaagactggtggagttgctttttctatatgatgtggacgtcaccgaaattaactccatccagacagtcgctagtcaagccaccgttcacaatgagattcggggctggaattgccaagactacgtacttgatcttcttgaggcactagaaaaagaagggatggtgaacggcaaggacgcaggctacaagaagcagaaaggtttacttcatgggaagcaggaagggctggcataggacgtgttctcctttctgatttgtgataatttgtgccctgttatccttattagatcagtctcttcagtcaaccatggcaaggcgcttgggaggtctgtggaaaggtaccaatgagtgtcaaaatgatgaatgccttgtccaaaggcatcaccatagcaaaagagctcagtggcctgagctttctggaactcaacatagcagcaacatgtgaagctcattaactctattctgatagttgatgacccctgtggtacgtcggtttttactctaatattaggacagacaatatcatggtgtaacaagatccctgtattaatttccgctaaattgttgctagaaatatgactgggagaaaaatagcaattgagtgactgaatcaatgtcctcattcaattttagttccgcagtttgcaaatcaagatgaaaaccctaacgccagccgatgtatcgttgtaaaccgagaaaaagaaagccgcccagcgccaacaccgtggaatagtaatgagtcttcgacgaccgctcagtcatgtctgtggtcttcatgactatcagccagcatctggaagcccttcaccagccccattgcagaaccagcggcgataccgccgactagtaccatttgtatacctccaatgacacccttgcggatatttcgacgaccgcgccagccactgacaaagcatgtctttacatagccgaagataaacagtgcaatgaccatggtagcaatggaccagcgcagggcgatgaaggcttcatggggtccgacgaaaaagtatggtatgagaggaataaatccaccgataaagtatcccatggcaattgtaaaggcgcaaacgatagcccgagagcccgagggctcgggcagagtgtggtggaagttcatgagaaaggatggaagcatgggagagtgagaaagatgatttttgagttgtgcaaccagttcagatggcaactcgtagggctcaaaaatgtcggagatggtgtcagatacagacgcgggatccgtcaaagtctgcgtctccgtttctttcaatgtagctttgtatgactccctaggaagatgtcagctgtcaaacctccaatagtttccctagtatattttcataggaggtaggctttgaggattcaggcagacttactcctcgcttttagcacctagatacccaccgagtcccatcgatatcgctcctgcgatgagctctgcgagtccaccgaaaacaacgattttggtatcgcccaacgcagagagtccagccgttagggcgaaaggcacagtcatgccgtcggaaagaccgatgatggcatcggacacggtgcgaccgtcgagaatacgagacgaccttcgctccgggtcattgtgacggtgtgtgttgttccctgcctcgatatccggtcgaagttgagcacgagggtccttttcatcttccgaagaagctctgcgatcgggaaggggcatataactcgacatggcgccgaatagggaactgattaacacggtgaggtcggagggattgaggactgaaatgaaaccttgcagtatcccttgaagaagacctgggaatgtttgtttaagtgaaagcgagggatacagcgcgattagagaaccagccagttagagcacgcgatgcaatcatgaggcttgccatgcttgcaacctcatatattgccagagaagtgatcagctcccaccgttgaccacagcctatcgagtgacacaggaagacaacgtgcttggcgttcccctcatggccagggcacgtgcaacgctgattcgaggaggttcggctttggagtggggccatgtgggaccgtgaaagggactcccgctgcttaacttggggtgtgggaccaatcaaaaactaccatttctaatccagacccctttcgtccatggactccgcacgggctcacgtgtgaatataaactatacccattgccagccctaagaggttacggtcggatattgcgagacattctgaggttagtggcaatatcgcttagacttcgcagtctggaagagttttcaccgcacgtgggctactgggcatggaatatcatctcaatctaaataaaacagggttgaaatgaagtccgatgatgttattcttgaatccacgaggaacattgatatccagctgagcatgactttcacctctgagccctctgactctgtggcaggtgatagtgtacgtagatgtagaagacataaggtagttgtaagcatatttcctttcttcacttcttcacttttcttttgcttcttcgcacgcttcacgaaggagctcacagtctcgcgttgaacaaaagcaaagatgattttctactggggcttcattattctcatggctttggccagtcttacatccactcatccaactgggaatactcaggtgtggggccagctgcgagagaacgtgagtggatcgcacagcatataaccccaaaggaccacatggcttacaagagcacttccagatcaagcatgttatctatctgactcttgaaaaccactcatttgacaacatcgctggctattgggacttccatccagaaattgacaatttgcgcaatctcaccttctgcaatgactacaccaaccccaattggacagtctatggggagccactagcaatctgcgctgaaccggatgcaaccgaggtgccgctcaaagacccggaccacaacttcggcggagtcacctacgaaatcttccgccagtggaacccgaccaaacaggatgtccctaaaatggcaggttttatcgagcgccaatcggagaagtacaatgctacccctggagattcggcattcgtgatcaaggccttgaaccggaagaagacagccactctggtggagctggcaagcaattttgccttttttgattcatatgtgggttcttcagtctacacttggctacgatatgtattattgcagaaaactgactgtcgactctaccttgcagttcgccgagcacccgggtcctactaaccctaatcgacaattcgcaacctcgggctcatcctgtggttttgtcgataacaccgatcagtccgctgggttctggaacaatgtgactgggactacttgtgcggtctcgatctttgaatcgctcagcaagaaaaatatcagctggaagaatgtgagaaaagtcttgttcctttgtactgacaactggctaaacatttctatgtagtactacgagaccgacattgtcgatggattcatgtataaagtcagtactttttgtactccaattgccagatcagttactaacgataatatcaagtgggtgcaagacaatgcaatggaccgtctcgtccatgcgacagagctgtatcatgatctagaagccggcactttgcctgaattctcctacctaaacccggagtgctgtacagttgactcaatgcaccctaccagcagtatggcagcaggggagcagatggtcaagcacttatatgatgccctgcgtcgctctaagtactgggacaatgcgttggttccgttatcctcatgttgagtgcggtaatactaaccctgaaatatagtgttttgatcatcaattttgatgagcacggtggattcgctgaccatgtccccacgccagtcaatgtgcctcaacccgaagacggcatcatcttcaatggcacgtcatcaaaccacaattttacgtatgactttacacgtctaggagtccggtatgcattctcatcccaatttcagctttaccgtatgaatattcggcttaccttctcatcatagtgtccctgccttcataatctcaccttgggtgcccgccaaccttctcatccacgatcaaggcaccatgtatgccgacgattcggcctacacccacagctcaatcctacattttttgcaggagttgtgggggcttgagggcttaaacaacagagttcagtgggccaagacattcgagacggcttttaccaacaagcggcgagacgatacgcccaagacgttggttaaaccgacctggtatggtggtagtgggcagccagaaccggaaccgttcttctttttgaaccaggatgagagctactatgcacgtcgcaaggcccaggctaaggcataatggatgaaagtggagagttgctatattgatagtgcaactacggtggaataccgagcaaatccttgagatttcgggctcgatgcgggaatctctcgttttatgatatcaggtagtctaatggagtggaacgatacctacccagtacacttattcacagggtcatgataatgcaatccagtcgattgacaccgactcaacgcttaaattgtcaacatgtagtacactgaacaacttaaaccagaggcgatctcaaagcaaagtcgagttgagagccccgtattgatttaggaagcataatctggagtatatggcgcatagtgatcgcaaatttgaatggaaagatcgtatatcaggactggcattgaccgagacgatagaaagcccagaactactatcactagtactataccagcatcgacatgtctctacaatttagatgacatacataagcggcggggcaccaagagggtggatccactctgatcttcgatcgggtaactttttgtggaaaggtggccgtttcagccttgaaagtggtcatattagggcatcaattaaataacttcttagattctcggtgtagatccacgagcggataagtgttcattgcgaaacctcattgcgaaacttggtgcagaatgaagcagtccggtgaaccagaaacataaccaagaaaatcatgcaggtccaacatatcacttgcgtttctcagcaaccttctgctccgatgaagacgagccagccatatcccacagtcggcttttgtaagcggggaaggaagtgtggttccacatgttgaataggacactatggggaaaatatcgggtcagtcgtcacgcacaagcaagggcgggaaaaataacacagcaagacgaaacgcacctctgggtctggtccttgtaggcctcatctttgacctcccttacttgcaccttcatgccgtccttggtgaaagctatattcttgcgctccatcttttcgcgcgtatttttgcctacatcctgcatgatgctgtagacgacaaatccgaccgcggcgatgatgccaacaaagacgaggagcaggatgaggggaatgatattgcgggcgcccatggtggggtttttttatcggtggtaccggagggtagtccagggaatttttggaagaaaaacgaggcgataggtggaattaaaagatgagagcgggcgggggaaaaaacaataggctagtatatgccaagaacgggtttcttgtcgaaaatagttgcagccttgggtctttttctgggcactgttgctgcctggagtggatctggatgtttgttgcacaagaatgctatttgaattccagcgggacaaggctcaatatgagagtcagggggttgagaccttgcaaggttgtttcaacggttggagtacacaatgacgtctggtttgaggggaaatggcacgcgtcgtggctgtgtcagattgcgtggctttcccgttagccacttcagttatttttatcgggaggctccggcccggtcccgggggcatttttgaggttaattttaggctggcatctctaactagatgcactccgtgcggagtacatacacttggacttagtctactttgatgggacgggtttgtacttgtcactagtatgaagatcacctctatcccgacatgaactaaagcaccccactacctaaaacaggatgatcgatctcgatctcatttgcgtcatcatgatagaactccaaactcaacgtaactaagcggtgaattctctatctggggaagctcatttcttcgagaaatctgtctggatgaaggtcgggacatttctctacaaattctagttcatacacctagcagcttagctaaatccgacacgatggccgacatccctttcattccgatcttccccatctgcttccaatgcggcactgatcagaacccatgtcactgtaaagtggttggcccgacactcggtaagttcggttccttatgcagtgtgaatggctgaaaaatgaacccatgcctgacgaaatggacagggtttttcactaccgttgtgtcagcggtaagtaaatatagtatcttctcgagcaataacataaagactctcttgcttgaatccaggctcatgacaacccttttctaggtcttctgctatccactatcgatcttttgtggctgcggcttcactcaaactggaaaggagtatgtcccgctgtcctgctacttcttgatatctagactaacaaatagtagtatgctgggataccctgtcaagttaaatcagaagatcagtaatgccattccattctgatattgcgagctaggcgcttgagatatacttgagggcctttttattgtaccttaaccttaacctttaatcattatctctcttttttccccatgcgtttaataaagcaaagtacttccgcccatctttcaagaaattgtaatttcttcgtagagtcgcaggggataaatgctcgagagcttctggtgacattgcgtttggatattaaaacctaaactagcatatactgtaagaaagagaacccaatgcgccaaattgaacacccgtctttctccatgacatgtattcccaagactacttaggtggaagtcttgttaggagcaggcagataacccgcagagtattcttcggcttcatcatagtcttgcaaatccagtcttttcaaggctccctcttccaacagatccgccacactagtcagagccaaaagctgggatccaaacccaggctgctcaaaccaaggcgaaatgggccccaaaaggacatcaaattccttggtcacctggtagacatggtagttgtacgggaagctgctgttggttggcgcgaacagattggatggtggtagggatcgctcgatatatggagctccaagaggtgccaagaactttccaaattcagacccgaatctatcaagcttctggcccacgcggagtgtaaaattgccaagaatagacgcattcgtggatgtttgggcaaatccatcgctgtctggatagatccagtaagccgtggggtcggaagcgttcacggtccatttctccaggaactcaattgggcagagctcgccgaagcgggcgtatgtcttgagctcattggagagagggaaatatctggggaggactttcggaccaagtcgtgggtcaccacaaacagcagtagagttcacgtgggtcactcctttacaggggtcggggtaacatctttttgggtaatccggctcctaagaagtatgagcatttgaaacttatatggcctggtaccataaaaggggtcttgggaccactgaccttgtttgtagcgtgcctgttaggagtgatgaaagaagaagcttgtgctagagcaaccgaaagaagcacggatatagttgagagatgcatcatgaattatcctgataatttctctctgtgggttcaccgaagaaaggaaacagagccattaatatactagaacggccaacggagcattgaccttccaatctcgcgatctacagcgctatccaaattctgcgcctaagctatgcaagcagatgggtctgtcctacagtttttctcccgggggttagccacgcgccttttcgagctcgcttcattccaatcggcggcatttttccccttgctactccaccctattcttacccgatttgtaggtcgtactctgtactctgtacaacatacaaggtcgaatggaatagcctacaatgtggtgaaggtttcgcactctccatgcctcgcaactcatccgacccggaaagatcacagatattctcagagtaccgcagagtacataatttattgacaatatgagatcggaatgccagatccaatcgcttatttgagagcaaaattcaattatgctgagagttttactctatggaccattcaaagagccctagaaatatgtggcgtttgaaaaagccagctgtgttagctcttaatccacaaaaatgcagatgcgcatagcttcctatttaggaaaatgagaagcaactgtacccgtacggaagcactccatacctgcaggcgcattaatttgctcaatactcttcccaacatctagcaagaattattgtgcacgttatcattacaattcatttgattgttattcccctgtcagctagcattggttcggtttatttcacttggttatttctatttgatttcaaaccgggcgaataaggagctaaaggaaaaagtaatataagacaatcaatagttcgtgatctacgtgcatgagcatgaatctattcggccatgagattcgagatccacaccttggcttgcaaaagacgattatttccttcacaggctgaaatctgagatcgaggactccgtacaaagtagaacttagccaataactgcatcatacagagtggatccaacagtagtcgcgtgaccaggtacaattcagggacagaacactcctaatcgttaggagagatggggaattatctatcatcaaccttgcataggcaactggatgtgtcgaattgacgcatcagtgaccatattggttagcattaagctgcaagcagatgtccaaacttgtacgagtagtactccgtaaaggctgaatctatttagccaaaggattagacccgctacagggccacttattttctcccctgatgtaggcaggtgggctgcgttaattaaagatcggaaagatcatagaactatcgatcgagactactccgcacaaaatacagttattcctatgctaagcgatattgcttggtagtacctacaaaacccccttccatttcattacaacaatcgacatcttccctcgtcccttgtttgggcttgccggagcccagtctttgaatgtaccaacctcctcaaagttgttcttctcaaataccttcatgctccctatgttcccaacaaaaaagctgcctctaagaagatgaaggttcatccgaggaatagcccagtcttgaatgacagttctaacagcaacactcatgattcctcggctgtgttgagtaggagaaagatagtctgttaatattattagcaattgacctcgagtctcactaaggtgcccatacatacatcctataccccagacgatatccttgtgccccacaggcaaatcattattctgatcctgtgccagcacaaactccgagctattgggttgcagctcatagaaagcataccgcatcagtgaaatgtctccgatcaagacatcttgaagcggagcgccggtcgcagggtctctttctgttactttgcggatacaaatgaaagggcatttatcaaaaaactccagctcctctggggaatttgaaccgtcgccctgctgactttgcgtttcgaattctctttgcagagtagacaggacaccctcgttttctgctactttcgtcttgacccagtctatgccgtgctcaggcagaaaagggtagggtggcccctgtagccaggagtacacccgtgaatcattgaggatttcggtcattgcagcagatgcctcctcgatctggtattcacggtgtggagtgatgatgatgtttgtacatggtgctgggagttggagatagggctctttagtgagcggattaaagtggacaaccattttgccaaaagccaacctaagtgcaaggcttccaagtggaacaactgcacgctttatgtatgattgtatttcaactgcacaaggctcgaagtcttcgtgagtcactcggcaaatgagagctaaccaattgtggcaacactacagttagcttgatattacccctatatataattttttcctccaacttcttggctaattactgactattgattctttgccgttcataaagtccgagttcgaaggcagcttattcagaccttctatcctcggacctgacaatgagaacatcccgcaggaactgcatattaggaatccgaatacaagcagcccagaatagaacccggcgatgcaagtatcgctagctagctggaatcttgaggcagctaaagtatacaatatctggatgcatttgtatgtggatcatgtcaatttgacagtccgctgagaaggcaagaaaaacgcttcgttatgttctattatacaaggaccccaccaagtgccaccaccatctcgaaatggcattaaccttccggggtatatgaatgttaatttaccggcactcgactggtcaattgctccagacgtcctgccaaagctcgatgtttgcgcatgacctcctcccattcataggccatatcttcggtatcttcctccccgcctagctcggtcaaagtcatgccaaagtcaccgcctagccgaccaagacttgcggcacagtaaagaagctgggtgagaagactttcccttgaactccgatcgcggacgttggggagatatgagcgcattgtatccgtgagcaattgcacgagatgcattgggaaagtagccaaagctggggggagacgttgcaagggatcatctgagtgtgctggctttgacttggccttggagtgaccgtctgcacctcgtaaacctgagatggcaaactcggattcggattgctcggagttaaaaatatttttgtataacgagacaattgcaaagctctgctcacggaagatctcaatgtatctttttaagtagcggtcggtctgctgaccaccggaccacgagttcgtgtctgatttgtccttgccagcgagtctccgttgggtttcttggtctgcgagctcgcgaaggggatccagggcttcaagcgtcgataccaaatgcgctagtctacagaccaggaagatagcaccaagagcgccttctcctgtcccgactgccccatcactctgaatcatatctagatccggggccactcgccgcagccaacccacagttcggataccagctgctagccgtaggttctgggttcggagccccgtaatcagattactggtcatgtccttcatagcatcctccgcctgggatgcaacgtcttgaatcaatggtgattcggggtataatgtttgtagtcgcttgatatgtgcatgcaggtcaagtgcagaggagtaggttgtagaggagacaccggtaccggagttgactgaggccgcggagacggctttggacagcagacttggtagttccaagatatctgacaatcgatcgacgttgcgagagagctgcatcgctttcttccgtcgttctagggcggcattgtctgtgattttactgtatttggtggagaacccaacggcctcctcgtcgagtttggggatagcatcgcgtagctgttgcgcctcacgggtcaactgtgggacagatgtacatagtgtggacaaattatcggcagaggtgacaaatgcccggtgcgaacggttcgatagggcttgaagggacagaagggtcgagtgggaggattgggcgagcgatgggggttctgtggtctggagagcttcgagcgacaaggttgagaggcgagtgagatatttgtctgtagttacatcgtgcgatttggttgcatctagatgtggagcgagtagctccagcaaatcggccatggcgagttgatgctattcgtaagatgcgtaaaagaggagcgctgaacggtccacggatcacccgcccgttggcccgtgcgggtcagttgtatccccgactggaatgaactttttctttgctttttcgatcctctctctctctgttttagatagacagatagttaggtcatcgttgttctcttctttccttctctttttccatcgttgtccttgtggctgcaaataggatacttctactagcccctcccccgcattcgaaacccattacgttccccatgacccttccaccatggggaagccacgggtaagtctctatttctgagtgattgacatatgtcttggcttaaactgacagtttcctacgtacagatgatcattttagtgcgccatgcacagtcagaaggcaacaaaaaccgcgatattcatcaaactattccagaccaccgtgtgaagctcactgctgaaggatatcgacaagccgatgatgcaggccatcgactacgtgaccttctccaacccgacgatacacttcacttctttacttccccatatcggcggacaagagagactaccgagggaattattgaatccctaacctccgatacacccgctccttcacctttccggaaagacacaatcaaggtttatgaagaacctcggctgcgggaacaagattttggtaatttccagccatgttccacggagatggagcgcatgtggatggagcgggcagattacggtcatttcttctaccggattcccaatggtgaatccgcagcagatgcctatgatcgagttagtgggtttaacgagtccctctggcgccagtttggcgaggatgactttgccagtgtctgtgttcttgttacgcacggcctcatggcacgagtatttctcatgaagtggtatcattggagtgtggaatattttgaggaccttcgcaacatcaatcattgcgagttcctagtattgaccctcaatcccgaaaacgggaaatacacactacagaacaagcttcgtacctggtcagatcttcgaaaagaccgagatcgtgaaaatgcatcgaaaggtcaggtccctgcgcccatcccacctctcggtcacacagataataccccaactcggcgcaagtggggaggctgccccgacggctgtaatcacggcatgactacagagggaagacaatcgttgcgagtgaatctattgaattccagctatgcccaaccaaagcatgccgatgaccatgtaggcggctttggctccaaacttcacaagtctatatccatcgacgaggtggtatcgttctcagaagacaatttcgcccaggatgataccagtcgaaaccccagcgttcatcgcgtctccaatccgcagcatacacttcgcgacaatgacaacagagacaccacaaagcagtacgattcaggctccgaagcccgaccaaacgtgaattcattgcctccaaaacgtccaaacttgcacggactgaaccgaaatagccaagaccatacacccacatcatctgcatcatcatcggcgcacctaaagtatgcccttctccaccttggcggccgtgacggtggaggctccatgagcggagcgaacagcctcgccccatccgatgatgaaagtgacgatcatgctcaccgtcgcgttgtaccaacttctcccggcatcgccactggcaatttgtcccatatgaaccagcaaaatttcgaattcccgtccaacgagcagactcaacagcgtggtccctctcaggagttcgaagatgacggcgatgacgaaatgagcggcaatgccaccgagaaatcgaagaaacctcgtctgcaccatccccatcaataccatcactattatcaccaccatgtttcttcttccaccgaccaacccgagcaccgcatggccaatatcctcggcgacggagacgagtcatccaactcggaatcacaggcgcgaagaccagaaagttcttcatcggattcctcaactcatatccacatcgaggaattatcattagaagagcagcaaaagcaaaatcaaagtatagaagggagcgtttactaaatctgttccagttgctttcgtcgatgccttggctgcacttctccttatttcctgtctctttcttttctacatctacgcttacgacccgtgacgactgtctggattaccctctagtacaactgcatttgacctacatcttacttcagaatgatggcccttttcggcgttaaatcaatattaaattccgtcataaaagtatatattacgagacctgactcagaattcattaaatgtcccaaaagagcctaagaggttgccaaatctagcagtggttatagagtagtggaggctcaccgttcaaacagaaggtacgagggggaaatccatacgagtccgagaacaaaacaccaaagtttggtagtcctgacaaagacaatattttgccgctaattagtgaaacatctaaggaactgagcattgacagccatagccacggacgcccgtagccaggtcaacgcatgaccaatggaagcgggacggccccagctcgctggcagtgccgaatggcaaagagcagaaaaattcagctatactacagttgtcaaatcgcgggaactcactagactctcaaaatgacatcagacaggagatgtatcaagggtaccgaaatcccaagaccaatcgtatgccatctgtgtcacaagcgaggggagagagaggtgggtgggaatgatgggatacatcatgcagcttagaaggctcggaaaaaatccttgaattgttgatctcattgattggagaagaacggctcggtagagcaagataaaaacaaatcgaaggaatcgaaagaagaaaaaaaaaaaaaaaaaggaatgaaaattgaaaatttgagttgagaagtgaagaaacacgattaacgtcggggcactgcacgtagcgtggcgaatgggaataatgtaccgaaatgaaatggaagtgaaaaagaagaaaaaagcactctataggtaatcaccgcgagacacaaatgccaagcataaaacaaaaggaccaaggatatgaaccgaagtcgtgggtaataaacaaagaagtcagattttggggattcgtgatagtcgtgactgcggccccggcaacctttggagggaaaaatgaaagacccaacaatgaggttagaagtaagactcaatgaaatcaaagtgataccaatataacaagttgagtcaatattctgcattgtgggcttgccgggagcatgccaatgtccgctgtgggagcgtttttcctcttttttttccattttcgagtttttttttcgctttgccaaacgagaaccagcggacgcagaacagaaatactttttgggacgcggtaggccaagtgctcagaagtaagtgaaagttgaacgaagcaaaaggtcgaaaggcgcaagattgaaaacaattcaagcaaaagaagaaacggtatcggaataaatcccatgcgagtcgcccaaactaacggtgaaagaagtctagagttgtagcaagaaggaattatgcggcgagacttgtgatcttgagccgtcgacacagtctgttccatccgaggtcgtgggcagaacttgccaagtatcaccaactaggttgcaatcatcggctgatgcatagagggaaatgcattgttgcacatgtagtgctcgagatgcttggcacagtaggtgcagcagcacgacgaaccatgacccgtccagagactctgtgcgaatggcaaaccgtacgccggagtgtgatgataggacggaggctgggagcgaggtgcagggtgaaccatgtactgtgagggtgcgttccagccccgcgagtagggcggaggcggaggcgggttagcgtaaccccaaggaccaaccgagtagtagtcgggggttgtgggcccgctggaaagggcagagggaggcgagtactcggacgcggtcgggttgagccacgagttctcaatttgggagctccgctggtactgcggcgggatagggccttcgggggacataaggggcttgctaatagcctggccgcgggccacgttggtctcgagaggtgccagagtctggcgagagtcctgagtccgagctgttgccttgacccgccaggtgtcccagtgcgcgcgccacgaggcgaaaccatcctgcttgtcgtagatgcggtcgtgaatcttccagtcaaaggcaaaaagccattccaattccatgtggttcaactcagcaacggggatgttgctaacctcagcccaggatttgttctggaaggtattgtcatcaaggaacttgctgcccaacagaagagccacagtcaacatgcggtagacttggctactgtctgccttggtgaaggcgcgtttggctgacaccaggcgcatacggctggccaggtagaaaagaccgagcaggatggtagaacttgggaggcgtgtcgaggacaaaatctgaaagacgtatttccgaaactgggggggaaccgaagatcctgggtagatgcttcgcacgaggtcaatatctgcaatggtgatgttggtctcgaacaaatcatacattccctgagccatttctgccacaaagtcggacatgcgatccatctcataatccaggtgagctgcgacacctccagttgctttctcctccttgcggggttgttcgagctgctgttgcatcggggcggcttcctgtcgacggtagtgaggcggcattgtagcatccatggggggaagctggacgttgctgcggattgagggcaatccagtgccaaccatggggttgaacatgggctgctggttcattatgtgatgatcgcgagcagtgttcatcggatgggcggactggtggagattcatcgaagtgggtttggcgtaacacagagactgcgagtattgttcgatgaattcattgccgctttggtggtagcgaggagggaatcctgcgtgaccaactgggtagaatgatgggtcttccatacgaccaccgttgacatggggaggcgtaggcaggccatggtggcctgggacgaagaaggacggcatcttgagagggggaagggcggttaccagttcaggacggggagctagacgtattctgttgccagggaagatgatgaatcagcataaaaggcctccggggtaggcaaaagcctgatggaccgagagacaagagttaaagaaacaaggagacgaaccgtctactccaccagatcctgatcctgggggggaggaagaggagaagagcggtgctcggcgagcggatcgctctgtcgtattcctagggggcagtctctagttgaatgacatcgaggtgcgttcaatgatccaacagacaaatgacaagtaaatgggaattggaaggagtgtggtgaacggtgaacaatgacacagtcctcgcttgaagtgcctcagtgacgcagcttgtgggggagggtggtagatcacaatccagtcaattcgaagggctttgagaggcgaataaccaggtcgaagcgaagcggaagagcccacgtagaattgtgaaccgaacgcgctgggagaaggaagagcaccggtggaagaaaactaaatttcccacgcgtagacgcaaacctcacagaatgaggtgatcaacgacacttagtgaaaagctcgttgacacgggagaagattgatacaaaaaacggggttgagaaggaggatgaagagaagaaaagttgtataggggcgttgtgggaaaaggccgttgggttgccccggtaattttacatgtatttggtatacagggaaggagtcactcggcccacatatggaaattctaaatttaaaaagctcaattgctgtttcacacatcgtgtctctgctagtatcaggtaaattaggccacctacaaagtatgaatcatgatgcttattggatgtgaatttaacaagatcgtcatttcttattagttttctagactatcccgattttttggattttttactataaaaatctatcctgcgtttcctataagttgaaaacgtgcacagtgcatagtgcaggtattatcatgtaattgtattgtaaggctgttaaagtaaagaaaaaggccctagacccttcaggcaaatccggtgatgcaacgtccgtgtcactggttctcgctggttctgactggtacggagttttgtattgagctttggcagaaaaaaatgaaattcgggcttagtaagctcagtatattccgtcgccttggttggaattcgttttcaagaaatttgaatagtaaagagtaaatactaaatatccccttattaaatcactagcattatcatatctataaaaaaacatctgaacatcaaatgccgcatccctccgtttctgaatctacaaaacccctacgtagtgctacctacggatgtgttcatccggactctgccaacaaaccaactccaattatgtacaactacggagtacaagtaggcactatagtcaaactaacaaaccttacagctgtcgccgggtcattctatccctcgatatgtaatcacacggctcattattccgtacacctaagcaagggcaaccgacaccatgcatctgacaaacactccatctactccgtactccgtacataactagcactccccctacctcttctgggctttgacatgtcagacacagtctaactggccacctagggaggaaccggggctctgactcaccgtggacaactccgccttcagcgaagacctgggtgttgatctctgcagtctgcatcctaatacggagtagcgtcatgctgcatgggcaaatggatatgttggaggtactccgtacatgtacttactcttggaggcaaaacagtgtcttggcaggtatttatctgaggctgacagcccgctatatttatgtgcctatctgcttaaaaggcgcatacatcttctgcgtgccaataaaaagccccatatatatggaactcatttctccaagaggggtctagaaatacattattaatccttaaatacttaaaatacttaactataacaggcatcgaaaattgcgcgtattaatgaattccagaaagaaaaaaggaagcccctcggacctcgtgccttgccatgctgatgcagttcctccgattctttcaaggtaccatatagtacatgcctatatacaccttgcaccacatgtgatggttctaaccaacatagacaataaatacatcaataaatggacctacagaaaaaaaggaaaaggaaaaaaacaggataacaggaccaacgatgcccgaccggctacattcggcagcttttcccctagaataaaacatctccatatttcctggctgcactatatgattccatttcgccgtaatttaaggaaaaaatcggaaaactcaagcacccctcctttctcctcagggcgggggaggcaaataagagggcacaagtacgtaggtacgcatgttgtacggagtaactataaggttgatagttaatcaatgatctcgaaagcactgtcacatttgtcatgatggtatgattcttcgcaggttgtttcttacaatttctgttttgggttccttatatatgccggtattgtatatggctgaccggtctattctatgctttggtgagcgtttgggcttttatgtcaggtgcctaggtcatgcatgcctggataaaaagaacaatttactacactgcctctgaatgggctgtgacaagcctgccaatgaagaaaacactgaaaggcaaccaattagaaaggcgtatacaaaggccttttgagcaaaagcagaggaatatcgttaatattcaaagcatgttgcaaaacaaagcttcggactttgaaagctcaatcgaccttctaaaggcaaaccataagctttactagatatgttatataactctagactcggtccttaggaaaatgccaggatccattattatccatatcaaaaatatacagaaaagatatgtactcaaaggaaaagtgcgacagcagcgataacaccaagagcagacaaggcgccggaaacagtcgaggacgaagcacggttgaacataggtgatgcacttgctgagctgctgctttctgtagtagaacccgaacccgtgcttgcacctgcgcctgtgcctgtggcagcagtaggagaagaggccgcggcgggggaaaccttggctgtggctgagtggattccggcggagattgaaggtgtggctgagctgatgcgtgtgagtgtgatgccgggcagattagaggggtggccggtattgctaccagcggagatatcagagccagagccagagccagagccagagccggtcgaatcttcatcttcaccttcaccttggttcgccgatactccggaaccaggtccactttcaccaacgcgagaaacactagtctcactgatcacacctccctcggtagtagcggtgccagtgacagtgacaatagagtaatcggtcgaaatccttgtctcactactaacaacagcagtcgccgtctgcacaggaacagtcgatgtatacactgcgccagatgccgtggtggtcacagcggtgttgattgggaccaaagtggtaccggcaacgatagtctcagtagtgacgtgtgttgtctggtcgcgggctgggcagtcagtcactgtttccgggcattgggttagagtgacagttctggttgagaggattgttgagattgtgtagtcattgtcactgccagataggctagtagggctggattcctcggaagtagcggtgcctgtgatggtgacaatagagtatgcggttgaagtctttgtgtcactgctaagaacagcagttgccgtctgtacaggaacagtcgatgtatgcactgcaccaggtgtcgtggtggccacggcggtgttgatcgggaccgaggtggtaccggcaacgatggtctctgtcgtgacgtgtgttgtctggtcacgggctgggcagtcagtcactgtctccgggcattgggttagagtgacagttctggttgagaggattgttgagattgtgtagtcattgccactgccagatgggccggtagggctagatccatcggtggtggtcgttgcatctccaacagggcagacggtggtcgagacgatgatagtctcggttgtaatgtgagttgttttgtcagtggctgggcagttggtgatagttgagggacaggctgtgatagtcgcagtgcgagtggtgaagacagtagaggttgtcatatccggcgtagaagtttcagctggggaagagctagtgggcttcacagatgcaacagttgtcggcgccgtggactctgaaaattctggtgttcccggtgtcgaggctgaagactcgatgacactgctggaagcggggtttacaggtccggtgatagtggttgttgaatgtggcgtaggagttccagctggggaagagctagctggcttcacggaggcagctgttgtcggtgcggtggactgggaaaatgccggtgctccaggggttgaggctgagggcttgatggcaccactagaagcagtgataggtgttgtcaaggtgatagggcctacagtgctacttggtgatactgaggagagcgatgaagatcccgatccctcggagctagaatggccagatggggagacagaagaggcgagcggagtgctggtagccacaggcgagcccgatggggtcttggtagggaccgagacgctggtcgaggtgaatgaaccacatctcttctcgaacgagaagttgttcacatccactgttgcgcccaatatcgtggcaccagggcaactaattaggatgagcatgtcggcttccgagctaacagccgtccattgcttggtgatagtctgccaggaaccggctgtaagagtgctaacgccgacatttgcaccattgagtacaagatccacggtacaagagccagctgtcaggcggaaatcgaaagagacagagtaagtctcttccgcaacggcgccagtaacggtctggatcaacagtgcctgcgattggatagcttcggcactcagatgcctatcacaaaatatgagtcagttcatttatactctgcaaggaactttggtctgtatgtatgattaggtaggtacgaacaagtatccatcgacaacagcaccggccgtgggcgggagaacagtccacacactgtcatcgagatcgatagtctcgaaagccacatcctcaatcaagttttcagaagcacaacccaagagcggagctaaagagggaatagtttgactaggcgcggtgatagtgagtgcaacagctggaagaacgtggacaagccacatcaagcagctttggaccatcatttttgtatagaatctagccaatgtaaacgaatggactggtgactaatcaccacaaaggagcaaaagaatgtttagatgagcaagtgagcgagtaagtgaatgagaggatatcgtgggcttttagcccccggatggctacatagtaatctccccaggtctgtggcgttactgctccacttggaaaacatggcaatttgaagcgaggattgtctcgctcaagacaaggcaattggttcctgcatgaattagactgacttgattaagggaccaggcacacatcaaatgagtaactagaatcgtgttattcttccacttagggcttgggaaaccttgtaaaatgattaccggcacctggcatggcttgctgtcccttgctgtctaagagtctcgggaagattgggcttattgtagacgccgtatttctcactttattgctgaaatcacaagagattcatgaaataactgatatcaggggtatctacgttttgatgtcccctccgttcggcttataccagtggcatgggcctttcaatagcctggtctatttttgtaaatgtgcgctatggcccatcagtaaccgggaaatctaagacatgccataaagtttaaagacaatgcattgcacaagaaaaagaagatctcagagttataggctgtcaacaaccaaaaaatcctccatgacagtctggttgtacctgtatatgctatctagccccaaaacgcccaggaaacacaacaggtcatatggaaagcgaatgaagccgatgtacctaatcacacaaaatgcacccgaataacaaaagacaagaaaatgctaagtgagaaaaatgaaagcgctgaagtcatcacatcatatataacatacctaccctacgcaagagacgtgggcaagaaacaaacgaagaacaaaagatacgcatataaacagccacgatcaaacagtgccgtagcggccgcgctctgcgcccaacaaagcctgtccctcttgagaaaccgaagattcccttgagtccctccggggcgaagcagaggggatccagcctcgcatccagccgtgaacatgcctccagcgactgcgaccgcgctttgggtcatccccatcgccactgatgaaactctcgtcatcctcgtgctctggaccatcgccatacatgagaaactgaacacccatgaacccgtccagtcccaacacaccgaatgcacccaagaagaacggcgtagcgcgtccaatccattccaacctgttattgccgtggttgtcagcccagccgccgccgccatatggggagaaatcggaccaagcattcgggttggtgagcatcgagctggagtagaacaggttcccacagaatgcggccatgaagagcagtggggaaagaccttcagtgctcttgcgctggtagtttttgtatagctgtggagggcgtgagccgagatacaggattgttgacatccaagagaagacgcggccgatgatctcgacgatggtctcccgcggtgcttccgaaatgaacgtgtcggacttgtcggtgggggcagcgtttgcgagtacggcacaaaggagtgatgccatgagcatcgtccggggcagtgcgaatggcgggctctgcatgctactgcccaaccttacagatcgacgcgatgagctcaatttctcgtttgagtatgacgctgttggcacatgggtcgagtcgagtgctgacccggcctggaagcccccatccttggcctcggggtgcttgttgttcatgttgacgggagccggggtctgattgtctgagtcgtggcctggaggaggcacgccttgaatgatgtttcgacgagccgagtcatgcgaatgtgacaagtcgtcatacgaatcattctggcgaggtttgtaatgagtgtaccagaaaaactggaataccagagcgatatcaacgaagacgtaataactggcaatcacgacctgccaccctgcctgtcgggtatatagcgctccaacgaggttgctcgcgtcaccaaggcaccagattaccaagaaaaatatcgataagcctgacgtcgactgcacttggtagttcttataaatctggggtagttgtgcgaaaagccatgagactatgctgagggtcccaaggacggaagagatcgccgcgagaggagtggggatgcagatgtggagatgcgaggagacggcggtcaggaagggcgaggtcggttcacagtggtcaggaagggtcccagagaggaggtactgtaatagtggaggagacatggtctgacgatcagggtgtctttgatagatccggtgacttggtacagcctcgagtagtgactcgtgtaggaccgtgtggcattcaaagtatggggtaagggcgataagcggatccgatgtgaacgagaagaagagaggatgtatgctctaagtctagtagagctaatagaccgagtaagttggaaggagaaggtattaagtaagtgaacgaagcaggaactggagagaacagatcttggggtcattctggagtgtcacgagagctgaatcgattgccttatcgagctcatcggcgcagatcggatgactcatgcgataagcataaaatgggcgtatcagggcttctccgagcttggaaatgcagcaccctgcatttaggtaacacatcattatgttgtacgatgtgagccatgatagttagttatcataaggatcgattagtcaaatgttctatacctaactaggtacctacatgtcggtacgtaaggtaccatctaaactcccaagatcttacatcccataaataacttggaagtggcaacgacacatctcaaagtcatggataagaagctagaattcaattaaaataacgtatataaccgtgctaagcgcccgacacaacatcttcccaattaggtctcttttgtatggcttactctacttaggcactatatgaattttctcaaccctcggactagctaaagtaagagaaagagcacgaatatataatgataaatttagcttcgttgatttaatgctagcattaattcccgatatccaatgagaaagaagaatagtatttaacaaagacactatacaaaggttctgcggtggcaatttcggattcggattctcatagcacgtagatcactcggtccattggaggggtaggatgtgagtggattttactgtggttgaatgcccatttgagcacacttttactgccttgatgctcggtataccgatcaagtactgtaatggtgcagagggcatgtcagtcgtcgccctcgggggcctctgcctccacgagccatgttcgttgatgatgcaattcatgttttcaatgacttgcaggtttcatagcaagaattgaaatgttaaaatgagattatttcctaaacgaaagtgagggtagataggtcgactaaggtgtagtgtgatatgaaggtcaattgaaacttcatgaaatgagagaactttgatagaagttttcaaatgatcattaaatttggtgtaatgcttgtttataagacaacaacctagacgctgctccttatatccgaggagatccacgctgctaatctttatacgcttcaatcaactgcggtcgcctgttaatctctagatatcctacataggtaggtccctattatgacgtcgaagcaagtcagtatcagccgctcaactcttcagccagctggaaaaggtcattagcacatgcattgaaaatcctgaagatgctgccacggtcactaagtagaagggcgaagtggagctggcggctatgcacgccactcgcagccattttgatgttgtccaatattcgtcatcgaatttcgtattaatagttctatactatttaaaggaaattgtagaagagcctcgctacctacggcccggccgcacgccccgtatttatagttggtgtgcattaatttactagtgtagtaattcattgggctaactgtgcatgttgtcacacatgaggtaaattaaactctgcttacatcccgacattaattgtgtgatacatgactcgctagctgctatctctataccccggcttttacgcgggctcactcaacgagaggtggctttgctatatgtgtctgacccgcaagtcggaagctggagactcggtggtcccatcttctattttgctggagtcttgttgtcttgttgtactgaactatggtatgatccctcacgaaacttcaaaccagccatgtcatgtgctcattgcccaattatcatgccactccgcactaagcgttcaaatcacgcggccagtgatgtagtaagacgaggtgataggcacgtaaaccccgcaagaccaggaaggttctctggttcgggtaggtcattggacaatggtgttggcggtcgtaccatccgggcgtatgtagaatgaattacatcattacaagcattccccgcattctggggtaatatatatatatataaaaggttgacatctctgaattgatttccaggagtctcacttctacaattcttcatcaattatcacaaatacctcacagattttcaatatggataatatggacaagtacaattctcagtgggtctcgttccacattcgggaccacatcaaagatggcgagatcctggtgcaaaacactgtcattgaagggtatctataattacagagatacaatagatctctactaacactcggcagcgccgagttcaccgaccccaacaagcgacgcaagtcgctcactgaagaggaggttgacgagatcaagatctcccacgatggcgttggcgagatcggcgctagcagccgccgtggtagtgagggccgcctggacttatttcatgacaatgacaagatttgtgagctccactgggaaaaccgaggtggagactacgccaacttggtcgaggtgctggacaaaagcgacaagtacaccatccagcatggaggatggagtgctgaggccggtcccctgggacatgtctttgtcgatgtcgtggagaagaagaaataattacgctccacaggctgcaccaactccctacttgggcgttgaagagcaaagagtgcagtccgtggagtatgagtggcaacatttggcagggaaagttggatgtattctaaagtgtcataaacaaacccaaaaccaccaaaaacaatgcaaaactttgaaaaccagtatcaatttttattccatcccaattctaatacataggtgggtgccaatcaagcaatttcaaagagctgcccaccgagccacgcggggtcagacaacttcattgatgccgaacacgagcagtgccttatcgccgaggggctagttttatggttggattttggttggcttgggctctgaatccttgtctgagtagtttggaaacccacaaggtaccataaagaatcaatccttgaacaggcaactaagactcccttccgcgaaccagtccttatcctttttccagccgtggacgatcaaatctcttccgaccttcaccacctcctcaatttgcttttgagttccccatccagggactctacttccccagcaaatcaggtgcacaccaacgtggatcgcagtgcggaaagccatttcatcatcaagggccccgtatccctctaggaatccttgcataatccacagtccaccgtccacgttcttgaacagctttgtttcgtacaactctgcaatcatttggcccaagtccaatgcccggcttccgatatgcgacatttcccaatcgacaatgaacattgtcgtcttggtttgacgagtgagaggctcgtttggaagaagaacactagaaatcacgtcattaacttggctcagttcatgaagtctagatccaatagagcatactttccagtccagaagtcaccgtgaataattccatatccatcatcatgactctgtcgctcaagctccgctgcagcgaggtcgcggaccttctcgaaaatatcacgatcctcctccagaatactggggaagttttcaatcgtgtccatcagcatagtgtagttcacccagaatttcaaatctttcatgaatttgttctcgccgagaagttttgtagattccatttgctgttcatcggccgtccaattgtgaaacaatctcaaccaggatcccagggcaccgcccaaggctcgccctgaggattcggacaagtcatgcgaaacctctgagagcaggaagttcttcaggtcgattgaatttggaagatcttccaaaacctgggtgtctgtctcctgattaaagtctaataagtgcggtgctttgacacttattttgccattcgtatatattgccaggccatcgagggcttgaagaatggcttcctcaaagtgctaatttgagatcagcatagttcgaagcaggctcattcaattaaaagcaactaacgcatctcttgacatcgattttaaaatctgggttagaggccgagtgatccttggtgtgcttgatgacgattgattgtccagttgaggaaagtctacctcgatagacaaagttggctgtgcccccagacaggcgtgtgagcgaggagcatgcgaaaggagtgagggaaagttgctgggcaatttcatcgcgtgtttgatcctcattgatatttgccatgttgtatggcttctttgcgtaagagtaaaagattgcgtgaaggtgaagggttcaagagtgtttccctctaggcttaaaacgcgctagtacgtatatcgtccccgcattttatctccactggcacacccatattccgcttttatcgccacatgtctcccaggcaaagtctcaccttacaaaaatgcgattacagaatattcaccctaaagtgcaggtcaacaggcattctgaatattcccttgttgatgttatggccttgtcacaccaaaatcgtgggctgcatagcatcagcgatgtctatcataaatttcagcctggtcgagaaggataggagagcccagctctaggctggctagattatgctactcaaaatcttggccaacccttctttcgcaagctagctttgctgcctagtcttatatggaagggaaacgggctccagcgttgcttcctatgaatccgagactgtctacctagatctaaaccagggcatacatatatatgtagaagatcaatactactatcgcttaaaaatggttcgaaaactgccagctattgaatccgtcgctttcatattagcgatatggggtaacaacgccggattaccgttaccaccacagttgcaacattggaaggatagtgtggtgaaatctttgtttttatggaagatagaaaccctcctaagcccatgatagctcagtatctaggcacagtaccgaaaacataattaggagggtatttgtcctttatcggaatggttgaagagaatgatgaaaacaagtgcatcaagataataatgctgtctctaaaccgatagcaagtctcgagcaaagtagagtacatgacttaattccatggcataaggtcggaatcctagcgcgacaaaaaaaaaggaaaaaaagaaacactaggcaaaagaacactgtccgaagtcgagatccgctcagtattcatcctcgtagtaatgtctcgaatggctggtatgatgagagtgcccgctatggccgctatgactactatccctcgaatggctccgatggccatgatggtggtggtgacggctccgatgatcaccgtgatcatgcccatgctcatattcactatcaatgtcacgcctcttgtgatccttcactttgttctctatgaagttcccgagtagcgcaccaccaatcgcacccagcaagccatgttccttcttatggccgagataatagcccgccacgccgccagcgatcgagcccccgagcccacggtccataccccggtcagtgtcggtatctgtatcgaagcgctgttcgccactgcgctgtgaatactctggctctgatgcatagacggcgggagggtggggacttgcggagggtgtgtaccgtggttggctggccggatggttattgctagggctcggtgttagtactatagcttttcacagctgggtatgcatcgcccactcactagtattccgcgttcccggggattctgtcttgcgcatgttggtatcctgtcggaaccactggcccaaggtagtctggctgccctgtcggcgtatagcttctttcggtggaggatccatatggatctggcgcaagttggtatggactttgctgtggagcataggcttggtttgggtttggactgggctggtaaggctctgatccggggttctggtatggcccttggtttccgtaaggctgccggtgaccatataccgggtactgaggctgatcctctgggcgatagtagtcaaccccgctcggggtaggcgttgagtgtgagttgtaagtattgtatggatctcccatggtgatgcgatagatatgttaaggaatcctgtcgcgtcaagaacgggaacacaggaaggttcctatatactccgtacctatgtgccgggtttcctttgccccttccgtattagtactcgcccctcccgccgcttttgctcattgagatcatctcaatcgatcaccgagcctgaccggagtgccccgattcgctcattgagcctcttcggagcctccggagcggaacagtaacctaactaaactaccaatacactagccccactgatcaacaatatttcattttgagcatcgcttatgttgtacgaatctgaatggaaagtgagccatttgtaattgaccaatcggttctcagcgtagttcccaagctttcgggctcaggcttaggaagccgtggcactgaagcgttgtcgtcacagattcattattgttgaagagttgtatatgctggtattgttgtcaattagataaatcaatctttggcctctcgcttcctgagctagaaaggcgtttccgtacctagctcctatttgcacaaagatgggggacatgcaactctactatacagatctaatagattgatactgatccgccacgtgacttcaccgagcagctcactgaaattactcggtgagcctgactctgagcgccctgattaaagcggcggcagctaaaacaggaaagtctcaccttgcagagatagatcagacagatgacttgcgggccctatatgtacatgcgtcatggtgcagctgaccaacccacacgaccctcgccgggacttcggaatgcacctgctctccagtcagatactgatcatttgcttatctgtacacatgtatagtttgaggagtgtgccttctaatgttttttttttctcttcccaggggaaatctgttcggcaactgatattgtattgagatacgccagtcgattaaccttgaatgataagatgtgaaagaaataaagctgaacacggatgagtcggggtattccggtaaaaatcgaagaaaaagatggaaagcatggtgtaaatagagctggccgttagacgttcagggtcacatcgctctctggggcgatggaaaaatgcagaacaagagtgcgccaagcagtggcatcaagacacagcacaaaaagtaagaaaaaataagaaaaaaaataagaccggccaaaagtgatgcgcccagcacattcagaaacatcctggccttcatcgccatgcaaggcggactacctatcaacacatggttttggtttcaagagattcatacacacttgattacacttgtggactccgaatgccacgagtcgagctgttactccgctgtgacatccagttcacaagcatctcgtcaagctggttgttcatctccttgagcctcttgctttcctccttgaataggcgaccggtgatggggtggtcagggccagcgggaggtacatttgatttgtcgtggacaataataaacaagtcgcgaatgtcattttcttcgtccatgtaggatcgcagactggagtcgctccacgtcggggtgtccacagaaagggtgtcgactaaagcaggagtagccgtgccacccttggggtaattgacgtcctgtccgggtgatgatggtggagacggtggcgagcgagagcgtacgtctcgaggagagacattgcttgtcgaaccgcgtgcgctcatgggggaataaacctccacgggagaaatattgacaggagactccgactcatctccagccaccagcgtagggacgaatttctgggcggacgctggtccggccgttgtacgacttggatcgttaggtcccctccattgagattcactagatggtcgatcaacgggcgactccatggggtccatggattccagcggagtagcaaagggatccttggaaaaactcgattggctgataggcgattgtaacacaatttcacaatcttcgtaactgctctctctttcttcttgtgacacctgtcgaatgcttttgttgccctggctctggttaatggcctcgttgcccctggcgaactcggccatcgtagggtcaaggacaggatcaaccttcatgattcctcggggctgcttgtgtagcttgttgtttgagaatttctggggcttagagggtcgctgttgttcgggggacatagactttgatgagacagagtccatcgaggtcttgggttggggtgatgtgcgggatgccgactctggagacctctctaggtcgtcaatgtcatctttgctcttcttgcgcttgaataacccgctcagcattccaggttttttgtctttacgcttcttctcctctttgtctttggtcttgtcttgagagttcgagcccttttcgatagattcaaggcttccacgaggcttcaccaaaacgtcagccaaccagtctttggataagcccacaaaggaaacatacctctttccactcagctaatgtgtttgtgctgttttcgtcgcgaatatcgcgcaggagatttggagtgagagaaatcttcttgggctcggccgtgtcgtctttgaagaaggaatcggtgttccgtacagtgccatttctggatctactgacgggggcttctgctttgtaaaagtaagttcagataccgccagagagaagttgagttgagtgtgtttaccttctgcttcgaagaactcttcactagacgggcgtcgatcagagtttgaacgctgcaaatcttgtttctctacaccgttagcatcgacatgctctgtggggttttggttctctttctgggcttttggccgaagaggttccacgacaatatcttcagcttgctcttgcacgtcttcctcttctccgtccagagtctcgtcgtcattgaaaaagtcgccgtgttcggaatcgtcgtccgttgagtagtcgacgtcggaggcatcgatgtacgtcggggctccgaagttgacggtcttcgcattccgacggcgcatggccttcttcagaggattcttcgacttttcgttattgtcacccaacatggtcgcagacaaatccacgtttctgtgtttattcaatctggcaagcctctcggttggtgtttcaatgtgttccgcagggaggtaaccgatgctgccatccttcaccacccgcacaagccaccagtagctgttgctgtcgtcgagaagaaccatagtatcaccctttgcggcattcgcttgcccatcgaccgtcgcgacgaagttatgaagcgcatatacaaactcgaagtcgatatcctctgtataacatcagttaacgcccgattgatgtctatagtccccgagagtccgtaccatcatcgatagagggcgagctggagattttgtccatcatatcatcgtccatcatatcatcgctttcgccgtctgccaggtcgccatcttcattctcgtagtgattttcatcctcatcgtcttcctcgtcgtctgcttcgcgatacgcctccttgtcgctgcggtattcttgatttttgtgcgatccgtcctttaattccgcttgcgaatcttgctcggcatggcgaatagcaagcccttgattgggagcaggccggccgctcccaagaggatctggttgttcgggttgtttggtgtgatctttggcggaaggggtatcgtgatcttgaaggtccaaggtatctagtggcggtcaacaccttcaatttcgaaccaattggcctcgcgctccagaagcatgtgacctaccagctcggatcatctgaggcctagtcatgttgcggtgtaaatgagtgtggtatcaagagcaatgggattggaacaagacgtgagcgcaaggagtgactagcgatccaggaatacggaagtcaagaagacaagcgcgggataaaagcaatgcgcgagccttcaaatttcctgtatccaagtaatccacaaatactagacagtaaaaaaagtcgaccggggtcgcgagcacttggtgagttggtctaaatgagagacagtgccttgaatcagaatagtgggggctggtctgcacttcggtccagcacggaggtcgacacaaggagaaagaaattactgccagagcgacaaggtgggaaaaaaaggcaggaacaaaaaaaaggaacaaaggagatgtctgccaagacgacgttgagtctgaatagcaactcctttcacatctccaaaagccaaaaggaggtattcccaaacaagcgccccttgcgcgcggttaaacccatggcttgacccctgaacccatatgcgggcacgtaatattggccgactggtcagagcttctatggtatactggcctttgtaagtctactagattggagctttttttcaggcaattcaagtatagaataatatgctcttcggcactcgatacagactacacagcactgtgaagaactatcaaagtcgtacggagtacggagtataccatatgtaatcataattaccctgcatgtcgctaattaccgctgtatccctgacacatctagaaaattagggcgtgggatgctctttagtcaggtgatctagaaattatcgccgtcatccgagtttccccggtttttttttcccctctcatttaccagactactccgtacttgacgaatacctcactcgcagtctctctcctactacctttgtctatactcactgtgcttaatctcgatctttttatttgctttctcaagtttaaacccccctcaattacgccttcctttacatcaccactgtatcaaacgttctttccccacttttgacgctatcaccccacaatcataatcatcttgaacgccatcgcgaagcgtaccgaaacaaaaaaagccaagcagagggttatataaccctactgcgagcctatcacgggctgacaataccaacatttcgcctcgttatcctcgttagggcatggcacatagcgagagggccggattggcaagtggattggcaggtttaaggattgaaacgaagtttcatgagcggaacaagtccaaatggacaaatgagaattctgtgaggagagcgacgacggtgggcgacggtatcgagagcgatcacaccaatcaatctcatgattatgcgcgtcgccacgatactgatcaagaccacagtttgttaagtgatctacactcagcgacccctcccatctccgttcctcgtcacgatgcgcagcatcatgcagtcgatgccgatagcttcccgcataaacccgatagtgtgcaagggtctcctctcgacagctatctgcacactcgtcgaccttcgatctctttcaacccgaaggtctctgtggactccggaaaccaaattccactagaagagccactgtcgatgggagatgtgaagaaccgtccaccacaaaaatttgagtctcggagctctggactccgaaatgctctttcacaagatgatgagcatgtcgaagcgagccagtccccgaactggagtcctaaacaatctctggatcggagttctccgaccggggaatcccgaacccaaccctttgctatatctgagaatggctcgaacgcgggctccgagctcgttcgtccgacgtccctgacatcgcagtcgacggtatctccggtcacggacgaggtacggacccctcccgattactccagtcacacgttgctgtcgccattttgcgtgccgtcaccgacgcaattctttgcatcgcctgaagacaacggcagttcttggtcgggaggaatcccaacatccttcggaagcaagcgtagctctaccctcgatcgcagcagcagtcttcggaactccacccggcacagttctcggcgatcgactaactcgggtggcaagtcgcccgccagtatgtttctttccatgtggaacaatgttgaagagtttgctccccagcccgatgacgaaggacagatggttggagacgactatgttctcggaaagcaaatcggatttgggggttttagtgcggtgaaagaagcctataaggccgaaaagaacggtgaaaccaaaagacttgccgtcaagatcgtgaaaaagcagattacagggcgaagcgagcacgaaaacgaccaagtacaagccgagttcgaccacgaagtgcgagtatggcggtacctcaatcacccgcatatattgacgctcgatgccgtatacgaaacagatcacgccacgttttgcttcaccaagcttgctattggtggtactctcttcgatctagtccgccaaaatcgatccggtctagatacacaattagcaaagaaatatgcgtaccaactagcctgtgcaatccgttacctgcacgaagatgcccgcgtggttcaccgagatatcaagctagagaactgcttgctcgatcctgttgagtctgctgacgacacaacatcttcaaacttggtattgtgtgattttggaatggctgaatggatgtccatcgacaatggtggcgactctcccgatccctacgaggatgctgctgaccgtccaccgcctcaacaaatgggccctgccggatccagtaccagtgtggctggtagtctggaatacgcatcgcccgaactgcttcaatcagtaggcggtgttgttcacccttcagtagacatgtgggcctttggcgttatcgtctataccgttattgtcggctcacgacctttccaagactctttcactcctcgcgtccaagcaaatattatcagcggcaactgggatcataatgctgtatacggcgacactgtggacggcccccttcgccaagatcgccagtatgccctcgaattagttcgcggctgccttgaaatggatcccaacaagcgttggactatccgccacgtactagcttcgtcctggctacgagaggttcatgaggcagctgaaccctcacccgatactgtgtggagactatgagcctttgctcatcttttcttcgattcggtgattatgtcctgcccttcactataactcctaaggcaaatgagattgtcttgaaggttttaacttcaaatttctacgctgtgatggctctctcttcaccggcgtggatatttaacaggcgcctttgagatcactatgatacccctccgtttccttctctttgattattttgattatttgctttgcttctgctcaagactgttagcatgtgcctttttttttgcggtttctattatctattttcaatatcccctcgcagcacattcttggttttgatttttggttgaatttggccttggcattacgagacggacgactatgatttattcttatagcatgcgtggtgtttcatattattattatcttttgtcggacgttacatgggcgttcgtcacttcagttctttgctttgtgttgttaacttagcttgatggtttgcttctactgatgtactttatatctgccgatctttgatttaccgatctggctttgtcttctctactcgatttggtgagatatctgtccggctggctggcctgtcctgggttcggaacaagactgatcaagttatgtgttatattttgcaactcgcaagaaaagtcggctgcacatgcggcctctgtccttaaccgcatagcactttgataatctgatctatctggctcaaattacatgatattaagcgtattctatctaaaataacatttcgatatctaaattttgtctcggtgttatagctaggatggtagcatgggaccccccttgtctatgagactagcgccaggaatcagaataacagtacgaactacacaggtatatcgagctttccacaggtgcgatggtagaatctctcaaggtgcagataataaaacggcctttccgtatatatatgtgggcaggcagggatatttatacataaccctcgagatgcttataggtaatgcaactattcaatcttccctagaacgaaaggtcttttggggagtataatagaaagatagggacgagaagcatttcattgccaagcctaacatatccaacagaacatatttatacatatacagcagaccagtctaaaccagccttaaaaaaaaaacaatgccgagcaaacgaacaaaccatcaaacagagatcaagtatgagattctcaccaagccctcaaatctaccaaagcctattctcaggcaagaccttctccttcttaacaccagcagtagacttcctctcctcagaagagcggaagaacagactgggtccctcaagcggcttaagcaggtgggaaagatatccgcgatgcgcaggatcacggtagtactcgatatctttacgcttcgtcggatccggcagtcggtacttcatttgccggttgttgactaccgtactccaggtcatccaggccgccgtagggcgaactttggcgagtttgtagagctgttcggagccgctagcgcgcgcccacgcagcagacaggaagctgtgcgtctcgccgtccaggatgcggcgaatggacggccgcgtgtagtagcgggtagtcactgagccgccggcgccttcgatggccgcgatggcggaggcggagacgcgcgaggcaacgacgtggattggttgtttcaagtcttgggcgccgtcgccgaggatcttgaggccgtcgataggtcggctgatgcacccgctcttgtagagctccttcaatgtaatcggttgtttagggttgatgcggccttggtcgatccaatattggatacggtcgaggttgacggttgccatgtcgacggagaagctggagccgaggagggagactgattagagatgcactttgggggtttgtggtggttttgacaagggaggatgacttacatgttgacgccgccgcgctcgccgtgcacgatgatatccttggtctgaccaccattgaagcccgctgggactttgccgtgctggccttgacccttgtgaccgcgaccggaggtcttacccttgcctgaagcgggaccgcggcctcgacggatgcgcttgttgtaggcagtcgggttgtcggagagggaggctaggatggaagcgttgcggatttgctgggattgggggaggaggaaggcgagtggagaggcattttgaaaggtccgggcggagaattgtgccagctgcgtaggcagccccatcagccggggagacattgtgtgtgaattgggttatagcctcgctggtgttgcattcgcgggttagtggtgagtttcgagatctctgtcggggcgggttatgtttgatccgactccgggatggccctaactaagtacagtatatcagtcgagctgggcaccgccaagccctgtgttgctcgttcggatctttcaagaaagatatcagctttttggataaagaaatagattgggttttttatgttccttttttctaatatatatatcggcatgtattcagacagtcgggtaaatgagtcaatatataacccaaacccttggttatacatctaaatctactatgacgctatgcaatatggtacaatgaaagatagtggttcaagggaaaaaaataccagttggcaaatctaaattcatatgctgcagagctaaagctatgtctgcgaaagtcaaacgccgtatgtatgcagaatgcgataggagcagtacattgccgatgtgctctgaggcacattcgacgggcgaagataaagtcaagaataacgccgcagatgccatccccgagattgattccgtctgcagggaggcgaaaaccgagttccttctaaaatggagcgccgaaaatatgccaaatacaatcgtgaaaatgaggaagtctgtgcagtcgaaaaaggaagacaggcaagagaagagaatagtaaggtgtacagtgaatgagataattttttttctcgtgtgacgggtcgtggcgcggtgaagtcataaacgcaggagatgtggtaaaacggggcacagaatgctttaaccagagtaaccggtgggtgggtagataggatgcaggtaaggagcttggttccacgcgtcaggctggatgtagggcagcaggccggtcttgcgagaggtgttacccttgctaagcggctggtagtgcatatggtcaaacggaacattgcgctgctgctgtagagagcttgacggaggtggaatcagcaaggtgttgacggaacgcactggccggtaaggcgagttgcggttggcgaggaagaaggaaggagagaggtgggtctgcggagtgtgggcggaataggctgaaccaaccggcgagacggtggcagaagacacgccgaatgggctctggtggtgccggccgagttcgggcagagaaggggtggtgtacatgctagattgcatcgggggtacggagagaggaggcatctgctgccaattcgccgggcgattgtagataggaggcatgatggctggaaggtgggagggtgccgtggaaggaagtgtttgaggcgcggggtaggaagttgggaggggaggcggatggtgaggatgcggaagacgagaaacgttcataggtgccaccggggccgaagtgggagtcaagacaggtggcagggtgggcatcgtattcatggcagtcgccgggaccgtcatcgacggagcagatgtggcggaagacggcgcgaaccgcttggtcggctgaagctcatcgttctcatcgcggcttcgtttccgagagcctcccatcgcagcctcactgccgatgtgctgtggcggcaagtatggcaatccattaggtggcatataccaattgggctgcggctgggatcggaaggcatcggtggtaggcgacggcaacttggacggcgactgcgattgcacgcggggaggcgaaacacggaacatggcggctgattcggcgggtagcatcgaggcttggttgaagtagtccccgaagagtcccagcttggtgtgccaccgggaccattcggtctcggaggagaacagatcatagcgaatgttgctcaagaactcgacctccataatgtgaatctcgtgcaccgctatacccgatacctcagcccacgtcttattggtgtaagtgttatcgtcgaggtctgtggatgagtcagctacgttgtccaatcaaggaaagggcggtgaaactgataagaaccactcacatttattgccgagcatcagcgcaaccgtcatcaaacggaactcgctgcctttcttgcccttgaccccagagttgaatttctttaggcggtaaatgaatagaagggccagtagaatgacgttctggctgacttgcgtcgtggaaagaatcgtggcgacccatttttggaatccgacggtaggtatggcctccgcgaccagggaaggaacgggatgttggcggtcttcgatagcttgcagtttcgaggtcttttcgaaccagaagagacaggtcatctagaaatccagcccgttagcttccacctcacttttgtagacctgggaattctcacctgagccgcaaactcggccagactgcccttgctgttgttgatggatgaggggatgcggagttgcgatccagttgcaccggttgacttcttttgcgccgttggttccgttacgggggcttctttgggcgcggggtgggcttgcggtttcatagccatcatcgagggaatggaatcgaactgcgggcgagtagggccgtataggtgcgagggcaccctgttcggtttccccccatatgcgataggtggcatggcattgtaggtgacgccggtcatatcgtgaggaggggtgggtagaccgttccgaatgggaacagtccgataggatcccgaggtctggctctcaaaagcctttgccggatgatcctcagtcaagtcaatggttggaactcccagtgtcgaagaggaggaatggaagcccagagtggaagacatagggaaagagtggtgagcagagaggtcgacacatggagttttatttcttttatttcttttttttttcccttttgatcaaagcaaagaaaggcgtcggcggatagaaccgaggagtttcagtgatccatgttctcttctatcaaaggtgaaagtagagcgcagacaatcgatgagagtgtccaattggaatgcaatcaaggaggaaagggcgaccggcgatgattccaagtgagggaaaagtgaatatcgaccgttcacagggagtttgaatgatgtatatagagtagccacgataggcccatataaggaaagtagtgataaaccatcagagatctggctactccacttggagatgaggaaagcgaaaaacggcaaaaatacgggaaaatgcaaaagaatccaataaataaaaccaaataataaatgtcaaggcatccgaccccatccggagaaagcgatagtggccatacacagagtttgacccggacgcaggtccaggttgatcctcctttctgggctcgtttgggttccgggtttggacaatctagaattggaaatatataaaataaaagaaaggaacaaggtaaggtaacaagtaacgggtcagtaaccaagtcagaaataataatcagaaataccggttgatgtcagagccacggggtgctaagtggatgcaactaaaaagggtaggtcacagaatgtttacctggtcccggcctcacatttgcagttaaatgacccaagttgactatagcgtaggactagtgaaagcaaaaagagggaaaaaaaagtaaaaaaaaaacaaatgaaaagtaaaaccccaaccaagttgaaatcaaaagagaccatcctgagacccatctcagatccaataataagtcaggtttagcatcaataaattaccaaaccgtgttatgcggaagggctgtgagggtgcgcaagcatgtaggtactgcaaagagaaaaagggctaaggggtggtggttgccgggaagcgcgggggggggccagggaggtttgagcacggtggctggtacattacttgtcgtatactatgggaaaggcaaaggaatgaaccgaaagaaaagaaacggaagagaaaaaaagaaaaagaaaagaaaaagacaccaatgatgagcgagtggaagatcaattacttggttgaggatgaccgaccaaagagagggcagatcgggagtctcggtaagaatggtgcattcttaggtaagaaggcaaaattactgggtattgggccaatcagcacccagagcctcggtattggccggaatggtccactcccagtctcaggccatatttcgctttaatctttttttattttcttttgttaatttatcccgtgtacgaccggtccacggtccagggctttcatcttgctctatcacacttgtgctcgcgtactccccgacttgttagccgccagtcattggttccgtatattatgcccagctttatgggtgagaggtaatttattcgcgtcttttcgtgtcctcaggcttggtcttatcccgtccactgttccggctttcctgtttatgattcagggggatctcatcataattacaggctactatcccaattttgatagttcagcctcgggaggagggcataccggccatcgtctgattcgtccggcttttatgcactggatttccccaaggtatttccctctccaatatacagattggtcaccacatactactccgtacctactttcatatcatgtacaactggtacatcggtatttatctcccgtcaagacgccctggcatataccaccgggactgttggcccccagtgggatgaatgagcggtttcaccctgtttgacctgtccagacggcacaagcttcacgtaaggtggcatgtagttgcacttgtgatccagtgtagggtagaaagctgaaattgcaacgggcccagatcggctggtggaattggaatccatcgctcgtggcgccctaacggtcatcttttcgagaaaacaagccgtgacggcccagagatgtgcacactcctcgcaaactatattgctgcatacaccggtaccatgatgtggaagtatcgtgtctaagtgtctctgtcagcaactcatcctagacacgcaaggcatacctatcgaaccactggaatcttcagaaaccttcatccccatatggtctttgggtggactctcacagagacacttctctatcaccgttcatgtccgaaaccaggttacttgggtaacctccaaacttgcctagggatgatccaattgtgctattttagtggcaaaaccaccaagcgaagtgtccggtcacccaaatcgtggaccttcataaaaaataagttgatcaggtgaattttataaaaaaaaaaattcaaagaaagaaagaaattgcaccctctttctctccactttggtttctgagccaccgccacggaagatgtttcgtttctagaacccccagacagaaggtggattgaacaagggaaagtccactgtgtcataatgctccatcttgttagacgatctatgctgttgtcgatggtttgaaattttctttttcttttcactttggcccagagccgactcctgattggtcaagtgctagagtgcccccgtcttttactattttaggccgtgtgttcgttcactcgtcacagtcatacacaaaagagccctggagccttgggagccagcgtcaaaggttgtttgactcggagctttgcccttttgtttcccccttgatctacattcgcttctgctcttctctttggtgggtcgaaacagaaaaaaaaaaggagtttgctaaaatgaagtctttacccttgccatcccggttgcggtatttcatttcgactgcacaattcccggtagctccacaagctttacctatcgcctttcgcccttcgcgggtgagattcctcggcacagtactacatgcagagttcgcctggccacaggctatttctaacctttcttagtctttaattattgtatagagagagtggggggaaaatatatttaattgcttttttttggaaaatgtcctcccttggaagaagtccggagtatcaccccctgtgtgtatagccaccgtctctttagacaggttgtacctccgaccattggcgcatgcagttggctgcgaccgctatgatcgtgatcttctcggcaatgtcataaattcgaatgtgtatcgtctaccgacatactgagtgtcgacctgatgcacgcggaaccccatcctatcatggaaatcatccgagctcacacctcgaccttaggtccgaggtacttctatcacctaccaatcctaccatgttgtatgtactccgtataatcacggggcacttgggaatatctccgcagcactttgcgcagcactttgcgcagaaccacacttcaatgttgcctcttgattggcgacgactaaatatccagagttttcactttggtagttgcggacagtgtgctccgtacgagaaacccacgcaacctggaatctaaccagggttacggagtaataatggttgggatgtctagtggctgatctaatctcgcaaagctgaagccgatccctttacgttgttgctcctatatcgtatactccctactccgcaaggagtaacttcttctatagtataatgataatccattcaatcaacagatcaccggcttactccgtactcagtctcgactatcacaaccaggatgtgttggctctattaattacgcattaaccctgacaccttccttcatcattacacggcggggcttggattccggtacaagccctctgcgcccggcatcaatttcctctggaattttaaattgcttacaatattgtggcatttaatttccttttctcttccaagtaacctatcttatgcgtcagtcgcaaggccaaaaaaccccccctacactttgtgagaacactcaggatctcaacgccgtgttcaaccaccttgcgcctcttacctagcacggctccttgcatgtctcccatctgtgcctaaagtactgagggcgacggaaatattaaatagcataggaaccctagatcattgcctcgatatcacataaccacacatgtagtattctggttcctctatcggtgcatacactatctgggattttctccgctctcgtaaccttgtaatacgcaggttacaattatctatgtcgcggattatcggtttgatgcgctgcttcgtatacattctgttttcgatttcaatagcataaggctgctgcaattaatcttctcttcctggcgtcatttgacccactcccgggatgaaggacacggcatgcaaacatctttaaactcttagagtaatccttactagacccaacaaccggggtggaagttggtggaattaattggagactcgaaattacagatccggtcgggacccataatgtatagattgtcgctacgagtaaaacgttaatattacctagatgctttctatatgacgtcggcatccgcagtacaacgttctatacggggtatattggatgtgatatacagtatgtatatcctgaagttgtcctgtgggtgactacggagtacttggcacccatatccatgggtaattctagcgctgcagtcttacgatgatcacacccattgaccctgcacgccaccccagagggttgcctcttccctttagtctcttccgagtagtcaccgacagaccgccgcaacccgacctcgacccccggaagtgcacaatttgtcaagggcaaagacaagggcaaatgcaaatgcaaatgagctcgggcacggccgtgtgacagaacggggtcatctcgaactatcagttgatgtttttttttttttttgaggctgatctcggactcgagactctgtgcttcaccaccccgcgcacaggggccaaccgccagagatactccatagagggggcgagcccacacaatccacacagcccacatgctcgcaaagtttcagaggcatagcaagttgaggggcaataataatcgaccggttctttttttagctttttgactttgtgcttgaccaagacttatctcacaatttgtctggattgtgcaaagcgccccgagcaccaagcaaagtgctaattccgagactaacagggtactaacaggatcttgaatcttgcctttttcaaagactctgcttccgcccgtgatttgactttggcggattcgagaatatattccctcaatggagccttggctaatcgatactctttttgcccccgctcgggtggcttatagttgatcaacgatcaatgcggtgacggtgtacggagtagaatctgaggttatgtgatctctgatatggtctagactgcaacatatgtactgtagtcagattcgcatccataatatactcggcacacaaactgtgggggaggacgtattacgcagcctttgtctcagtcgctttcaacgtctaagattagttttccaggcttaataatgcaagacacttggggcttgggagtctagagcgatgataatatcaagtcacgactcgacgatcccagtcggaacgcactgcaccggcatccgatgccaggaaataaattcttctgccttaacattttacttagctttgaatggtggagcagtcaacgcgtactccatacacattctggcttgcacctttcttgctaccgagtaccatagtccaaagtgtacacaagatcgcatattccgtctcatccgggagccacttcttttcacttttttgttctttttttattcgaagataaaccaaaataaataacagtgtagtaaaggctgtcctgtgggaaataactcctctgccccggtccaagacgtgttgcaatgccaggtacagtcccgaggcgagctgggcatgtttccaatctgcagccagtagcactgtactccgtactcttctgtacattgtatatgcgaaatacagatatgcaataataccagtgccagtatgaaattcaaaagagaaaaaaaagcacggatatacggcaaaagaaaccctccaatctcgggaaacttcacattgtcacttttcgattttatgtggatcagcggactgccttcgcctgcacggcacccggtgggtgaacagcacatatgtcacagtcatcgacatctcacagatcgaatcactgtcgtttgagataaccgacctaatgacctagactcaatcgcgtttcaattcaatcatcattcaattgcatctccagatctatatcgcttggaactaaatctttgacctctcggagttggtggacgacggcttggtcatttcaaggtctccggggcagacatggtcatagctatgaccaggaacacaggccagtggcgggtttgtgcttttggcgtaaccgccctctcacccttcgtgttcttttcaatcttttcttctctttggcaatcgcggattgaggccgatcaacttccaatgtttctttgttggccctcgaaataatcgggtttattcaatcgtgctatttctgaaaccgaacagggctttactggtctgatcatttctttgaccttagtgggttactggttgtgcgtcgcgggtgacagactgctcacagttttgccttgggtttctttcttttcgtttgcctggatcggaatcgactaacctggatgggatgcaccatggcatgcggttgattcttcgtttctgatttaggattccgaacacaatatgccaactaaaaaaatgcaagccgactaaactcatgcaagttgcatatcggtctagccttgcttcgggaattcaaggagtcagattaaccccggattaaccgatgcattcgccattgaattgcatgtctattcatttgcagcacgtaaactgattcctccgaggagactaattgcgatgtctaattctggcctggaagatatcttctgcgttattgtttcgatcataatgccacaacagttcattcgagaagaatcaagcaagagacttgaggtttcataggtaagcattttcgaagcggattacatggccattattgagagtctgtcttgtattttttggtaattcgagcaatggtctatctactccctatcctcttatcagacatttcagaccactgatctgtgaaaaggaataattgatcatacccgttgatatcaccctgatctcattaacattctagtctgatgccttgccttttcaaacccgaaggctctgtgtgtacagactcaagacaggaagcaatacgccatcaaccaagtgcatccaatcactcacaggaccaaccagttcatgttgatgagagcaagcaaggcggaaaacaatccaatagacaaggcgaactcccaacggaatagtaccgcactctacatgacacatttcgctcggagatgcagacacgaagccacagcagcacctccgacatcataattcggcctcgtcatggacataatggaacctcgcctttcccggatccgaactatctcatgaagcgactggccacatttccacctcgcagtgcggctatatgtacatttcccccgtaacacagacaaacgaaacccgaagcataagcgatgtcaaacccagccagacagagccaatggaacaaaaggaagtacagctcaagatattctataccacaccaatctaagccgcatcttgcatagccgtacctccaatgaagatatgatacctcgtgacacggagaccccgatatactcaaccaacccagatgcgattcagatggccgcgtaggcggggcaaataattagctgaagggtgatattatgctcatacccgcgtaagagcacacttgtacacttgtcaagcaggggttgggcctactcaatagacagactcgccagttgcaggctcccagcactgcttacttgcatacggataggcggacatttgttaacgccgttatgtttggaatttgtccgggctatcactcgtagatacatgtagaattggtatctaggctctgctattacgggttgtgatgcagtaggattggatgtgttattcttctttctagtttggtagattgcttatcttcgtgttatataagagagtgtggggtcctcgttggattatatatcatgctacatgtatcttattataagctctttgcaattggatataatattatcttgttctagtcgcaaatttagcattgctcctaatgtccgagtgtctgtcacatcggattatgatgtctcggttgatattctagcttatacgtaagtttttttgacgctctaggaagccgaagtcatatagctgcatttgatatgccacagaatcaatggacgaccctcgccctttcggtgatatgagcataaacgaaaattttatttatgcaatattggatagactaatgaaaagaaatctcttaggtttatatcacatttgcagatatccacattttttcttggttttacttatacttgcatctgaagcgctgagacctccactcctagcagattttcttctatgatgcgtcatatcggagcgggtatcaagtctccacaattagcgggtaatagagggcgaaaatgtgtcggacacccaacaagaactccgactgacacgagaaagaccgggagcgctgccgattgctcacatcagacgtgcgattaagctcccagagacaatgataggccgacccgggccgacgtttcctacgatatgcacggagtaactaggtcgatagtcagaccatcgggatttgtaaggctatagatgggagaaaccgggccagttatgaaagtggagcttcgaacttccccggattttgtcaaatatagctttggcgcgggaaacgttagagaatagcgtatttatgtggaacatagacgtgcgtataaagagagtccgtcggtatgcgggtaataccggttgagcgtcggagaatatcgtaggtcttgggaattggggggcgggggaggaaaggggaatatcgttcagcaaggtgagggatcagttcgaatatcatcaattcgaccttgagaaagagcgtggaagcgtggaagccaaagtcgtagcataattttaccccaaagaagaccccgaccgaccgagtttgaagatcgccggttaattttctcctcaccgggaaattgcttgtcccctcagttctccaattttagtatttcttgtcctttttagggaggtttaggcggttattcgagcttggacaggaaataagtacaagtttcaatggacgttatgagcttagatcttagagcagcctaactatccccgtaaatagcaggtgaatcatcgcagtggcagaaaaaaaaaagaggaaaatgtacccagtacctctgcttgctgcaggaagcacgcaatgggggaagtaccaggtacacagctatcccctttggtccggctacaccgattcgcctaaagcagcagcccaacaatggagcttatcaaagcttttttcttcccttcttaaattattgtgtcacccttgattttcatcctatttgtatttcctttactacatttggtgcgccctttcacaatggctggcagcacgctagcaattcgcaagatggctccgtccatgcagctgtcgtccatgacgcgcagatcgatgtccacgcagctggcccttcgcgcaaagccgatgcggtcgaccaaacttatccagtctgtgtcgcgcatcactcgtcgtggctacgccgatgctgcctcgaagcctaccccttcacccgccccgaagcctaagaagcgtttcagagctctgcgttgggcctggcggttgacttggctctccgccatcggtctaaccggtgctgtcgcatacagcatcttcgacctccgtcaacccccggaccaggcccctcctgacccatcaaagaagactctggtcattcttggtatgtatcggtcgcgattgtacccctacagccgacgtgtcgctaacgcgactgtgctcgttcaggaactggctggggctccgtttccctcctgaagaagcttgacaccgagaactacaatgttatcgtcgtctctccccgtaattacttcctcttcactcccttgctgccctcatgtaccaccggtttgattgagcaccgctcgatcatggagcctattcgaaatatcctgcgccacaagaaggccagtgttcagttctacgaggccgaggcaaccaagatcgactacgagaagcggattgtgtatatcagtgatgattcggaagttaagggtgatatctcgcacaccgaagttcccttcgacatgctcgtgatcggtgttggcgccgagaacgcgactttcggtaggattcactctcgcatctgaaacgatgcattttggactaatatcgtaacctataggtattcccggtgttcgtgagaactcctgcttcctgaaggaagttggtgatgcccaaaaaattcgtaagcgtattatggactgtatcgagactgcctgtttcaaggatcagaccgaggacgaggtcaagcgtctgctgcacatggttgtggtgggcggtggccccactggtgttgaattcgccggtgaactccaggacttcttcaatgatgacttgaggaagtggattcccgaaatcaaggacaacttccacgtcactctcgtcgaggctctacccaatgttctgcccatgttctcaaagcaactgattgactataccgaatccaccttcaaggaggaggagatctccatccgcaccaagaccatggtgaagcaggttaccgacaagtacatccaggccgaggtgaccaggcccgacggtaccaaggaacttgagactatcccttacggtcttctcgtctgggccaccggtaatgctatccgcagcgtcgtccgcgacctcatgtcccagatccctgctcaggccgagtcccgccgcggtctcgctgtcaacgaatacctcgtcgtgaacggtaccgacaatgtctgggccgtcggcgactgcgccattgccaactacgccccgaccgcccaggttgccggccaggaaggtgctttcttgggccgcctcttcaacaccatggccaagaccgaggctctccagcaagagttggagaccctgtcagagcgccagtcccacgccaagggcgacgaggagcgcaacctgattttcgacgagatccgtgagcgccagaagcagctccgccgcaacaagcagatcggtcccttccagtactcgcaccagggctccttggcctacatcggtaaggagcgtgccgtggccgatatcagctggctgagcggcaacatcgccagcggtggtactatgacctacctgttctggcgcagtgcctacctgagcatgtgcttcagcagtaagttctaagctctatccaacactgattgaaagtcatcattaacatataatctagctcgcaaccgtgtccttgtctgcctcgactgggtcaaggctcgtctctttggtcgtgatgtctcgcgggagtagacatatccacccggctctgatgaccttctgtaatcttgccaatcccactacattttccttttggatattcaatgccttccctgacacattgactgtgtaatgtgtcccgctacgccccccttatgccatccccaaccatccttctctttatttctctttgcacctgtgaccgtgataaacatattcatttccctttttttctcatgactcactgttggtgctgcgattggttccgcccagagacaaaagcattaattcgcatcttctttgtttcactttgggtttcttttcagactgtactgtacgctataggaatatatagactgggtttggggttgttgtatcaaacctgtcatttccatctgtgtattatctttcttccttgcacagtgtggtatcacactgcgtgcttggactctacctcttgctcgctgaacgaaattccttttattctgcgggtcaatatcacagatctggctcattgtcagccggaggaaggtatccgtcgccgttttgtactctcttgctctgcacgcgcacttccaagcttcgcacctccttgtgtcttctcagcccatagcccttaccaagattgacatctcccaccggcgatcgaagtcctcataccaagtcccacgcccaagtattctcgccgaattgcggccaaagataggcttcagtttatgacgagttagcttgatgacagtttttaggaggaggcctcatacattcatgtgtaggtcttatacttgccggccaaactctagtgtagctaggatttttacaaatcaagaatgaagaaaggaatagattatcaaccttgcgatgaatggtctatatatacattgacttcaaagcagttagagatacatactcccaagaggaataggggaagaagacggctaaacaggataaagaaagcgatgagaacactagcagaggtatcgaaactccagatcgagaagaaaaaaagagtgtttcgcacaggcagtaagggagaagagtcaaaaagcccaaacatcatatcttctagaaaaggttccaacggccccgcggttcctttccaggaggcgtacgatctgatttccgagcgcggccgtcaagctgtcggatgccttcgatcttctgcagagccagctccagcagctcctttttgcggatgatgtccaggtgacggcggatgcggggatcctcgcgggcaaaccgctcgacctcggcatctgaaagttgtcgtccaagccttgaatcaagctcacgcgggaaattatagtaaaactcagataggagctcgacgttgaggaatagcacggccgtggatgtaagtttatctgccacaacatctaggaacacctctgggcaatagtacttgttcttctgtgttgcgcattgcttggaccggacagcgagaagtctcatcttgataagatccgctcggtctcggaggaagagaccttctcgtcctagataatacatgtcagtgtctgtaaataaacgaaggagagaaataccaacctctcgccaacaaggcagcactgaagccacccgcaccgccttcgccgttgccctctagtactacttcgccctttcgcactcggtcgataaacgcgacaacgtcttggagttttcgctttccaaccgtgtcttccacatgcttcagggccgactcgcacgatttgagctcttcctttagaactttgcccgcgttatctctgcctttagcccattcaggatcttcgatctcaatctcaaatttatatggcttgatgcaattttcgacttgatcgctggtgctgaaaaacttgtcattcaaaataccggtgcatgcatcggtgatctgtttgcgggcaccagggtgggaggcgaacgtagaggaggctaaaagcgagtccacatgattgttgagggcattggcgacaactgtcgtagccaaccgaccaattccaagctttgttaatgaagaagtagaagcatcaagcttccggtgccaatatagggactcagcatcggcttttggaagatccttgagaggatctaattccagcagcggaggatctaagtcctcgactggcttgttccagtaacgctgtgccagaatgtccatgactcgctgatccaactctgccttaagcatctcccgaacctgcggtcgcccgaaactttccgcgaatgccttgaaggagtgcttgaaagcatcgaggctctcagccaagtgggactccgcgctcaaaggccgatcattatattgaaccttgaactcataggttgtctcttcaagctcttggctaatggcgtctctggttccagacaggctagatgacatggtctgctcaagaacctgcatcagtgttttccgtaatgtcgaaacaccgactgagacgtcagagtggggaccgaattcattttgatgcgcagagaagtaggcatgttcatttttgagaatggcgctagtaatgtttccagggcctctagaaaagagagctgttgtttgaggaatcctggtaacaacacccacgtaacctagccggagggggtattttttatcggaaaggacatcgtggccacgttcggggctgacaaggtccatcttcgtaatcacaccgatagtccgttcaccccgagggtctactcgacgactggctcgaagtgctgtcgagttcgctaggtcaacgtcggcagccgagatcgccaaaatgacatttggtggctgaatgtacctatcgcaaagatcaacaatcttttgcttgagctctgggggctgatctcggcccgcaacctgaatatatccgggcaggtcgatcaaagacagatccggaacattgggagaatatatcgtaagctgaatgggatcgtctgtgacacaatccttttcgggaacggcaaggttcaggtccgtgagtgtgcgctgaacttgagaaaaatccgtgatctttccgagacccagagccgggaattcaccatattctgcctgggcgttaggggtgttgaccaatgtgagctcgattggccgccgggtcaccatgttcgagcccttgggcaagaactcatggccgacgatagcctcaagaacagaacttttgcccgacgattgggatccaatcacgacaatcgacggaagagtgagcgtgccggactggccgatggtctggagaatattccggatttcaatcattttgcgtgtgagcagcatcatttggtcatcctccgcaacatctctctccggtcgcaaatctccctcccccgattgagcgtatccaaatgccgcagtagtagcagcggcggcggcagcagtaccagcccgactttgtttcggctctttgcctccaccaccagacgagtcaccatttctcgactcggactcctcgtcgaaacgtaggaccttctgcagccagtcaggcatttcgatgtttccggtcgtcttattccacccgcgttgtgtctgatcagccatgccctgtagcccttggaacaaggtcgaagctgtattccccgctgtgtccgaggcttgcctgaagacatccatcacatagttaccggcctctggaagattgaatcagcctgagcttctgcttgcagtgagcttgatacacgagatacatacgagttgcttggtattgaaaataagctagacccgcgattgttgcaccgccgaacatagccggaatcctgaaaagcttcaatgcaagcttcggaagcattcgagcaaatgagattgatcgaacagcagggacattgtggatggcatttgcacccactggccatgctcgtcctctgagagcagcgccaccatctgcgcgtagcaggcctccggtcctcgagcctgcattatggatatggcgagctagttgaccgttccgcaagagcggtcctagccgatgggagagtatcctcccactcattattgttgtaatatcattcaatagaaaatggatatgaaagtgatggccttaccggatcactgcacatgtgacatcaagcctaacttacagtccccgtgacctgcgcaagtagccgcgtagcttcccgtagcttccagtaataccaccgtcacgtgaaatatgacgtgctgtgcaagggaagtgagtttgctcttttgtgttgatttgataaaaacaatctttcctcttcgtgatctctagcaaaaataaagctcaaatatcttgcttttttggctgtaagatcgcgggtgacgtttgggcatctcaccggttcccaacagtcggtgactcttcttccgccccgaccctcctcatacatcctttgacaccagtacggccttgttcagactacaaatttggcttacaccttgaagctactagtaaatttggaagtggaatttgatacagtgtcatttccaccgcattgaatccaggccaaacatgtgtcgattcctggtaaggtccatccctccaagcattgggcccgaagctaatatctcgattagatttacaaagggcgaaatgagatccgtctcagtaagctgataaccgagccaagtcattcaatcctcactcaatcatatgattcacgcctgagactggtaagtacccacataattagcatatcgcaacacgctgacatgtaatatcaaggacaatcgccgtcctgtcaacggtgacgggtttggtgtgggcttctacacagaccccaagcttggaccagaaccttgcatctttacttcaacactgccggcctggaattgtgagaatctagagcgactcgcttccaaaacatgctcaaacctgatttttgcgcatgtacgcgcaacaaccgagggttctcttgccgaaaacaattgccacccgttccagcaccagtccttgatgtggatgcacaatggcggtatcggtgggtggagctacatcaagcgtacgctgggaagctcactcgccgacaagtggtacctgggtgtgaaaggtggcaccgacagtgagtgggcattcgccctcttccttgacttgcttgaaaaggaaggagtggatccaagctctgaccccggccctgagggattcgggcaggctctcctacgtcgtgttttgatgaagaccattgccagaatcaatgaaatggtcaaagaaattccaaagaaatataatgtcaccggagtggagactcggagtttgttgaactttgctgtgaccgatggccatactgttgtttgcactcgatacatcagcagcaaaacagatgagcctgccagcttgtatttctcttctggtactaagtggaaggaaggtgaaacgaaaggacacttcaagatggagcgacacgataaaggtgctgatattgtcctcgtggctagtgagccaatcacatttgaacgacgtgagaaccctttctctctctctatgcctatgaacatatgctaattttatacgtagacaattgggtgtcagtcccaacaaattcagttgtcacaattcacaagcagactgttatgcttcacccaattcttgatgaattctatggcgaaaacctcaaccacgaccgatcttcctgctttgctgtatccaagggacttgttagcaccgctcctgggacaaccgttcgaccaacgaatacgcaggagtcttgcgccccttcagcaacttgcaatgctatcggaaacaccaacagtggtatggaaagcttacgatctggtcatgttaccgaatgtgccgtgtcgtactaaattcggcatcgagccgatcattcttggagtctactgtgaggttcagccagagacttcaaagcactgtcttaatatggcgttggaaagatgaatatgccgggatatctgagtcaaattggagtttatgagttggaatgtaagcgtttggggttgtgtggtctttcgggttatataatttgcagaattcgaatgtaaaatgaatgtcaaattgaatttggagaagtattaactactcagccaagagtagaccacatggtattcatacaattggaactctgaatccatgattccggtttgtttgtatatatataacacccggtcacgtggttacgtatcatgacgtaacttaaaatcaaagtccacaggtggacctaactaactagtcaggaagaccgagtcaggcatcatctgcttggttaaattactccctaactctctatgtctatttcatgaacatggttgtctgagaatcttaaaatgaggaagactttactactcgtctttattcacggtttcaaggtatgcaaaatgcctgcttgttgaagacctggtccccgcaaagaattacagatttcagcccaacaagatttgtttttttgacctagaacttacgttgactgataaaatccaattctagggcggcgatgatacttttggcacgttccctgagtatttgcgcgttttcgcaagcagagcacttcctgcggtcgaggtcgccactgctgtctaccccaagtatgagactaaaggtgacttgaaagagtgcgtggcaagattgcgagattggtaagactatgctcagctcctcttgtgaacacatacaggttttacttacgacgatatctcttctgtgtaggttacaagatactgtgattgatcttgaagtagccagccatacggcatcacccaccgttgatccctcggtccatgtcgttctgatcggtcactcaatgggaggaatagtaggagcagatgttctccttttgctagcagcggaacaaccaattcctcgaaatacgcagccagggttaaatggcatcgaatctatcgtggaaccgggtactttcatgttccctcatatacaaggagtgcttgcatttgataccccattcttgggcatagcgccaggagttctgtcatatggcgcagaaggacactatcgtactgctgcaaccgcctacaataccttctccgaggtagcaggtctgttcggttacggtgggaacaatgcatcaaaccaggggaccacccatgcatccccgaaagagtcccccaaaatgtcgccttccacacccgacgccgccgcgacaccttcctggcaacgatggggtaaatatgccatgttcgctggcgcggctggtgctgttgccgctggcggcgcagccttatatacgcaacgccagaagctcactgacgggtttggatgggtatcatcgcacctcgagtttgttggttgtctcgcgcgcacgtcggaattgcacgagcgtctcctgcgattgtcaagtctcaaggaggaacgtggcatcggatgtgtgaacttctacacatgcctcggaaaaaatgcgactagtcttgtggaaaaaacatcagcaaacaaaacatccttcagccagaaaatcattaggtcgaggaacaggaccttctgttcattgccagcagaggtggaacgtggcgagggatctcaaagtccaggacttttgtggaccagggcagttaatgaccaggctactgacgaaacaaacgcacatattaccatgtttctgtccaaagagaatcctgcattttttgaaatgctcagggaagcgtgtgcggtcttggtcaagtcgatagacaaaggctggtatgattcgtccaccgaaccgcccaagaaagacgatatcaagcaaccacatgcaacagagggcacaaaaaccaaaacagacggggacttcatggatggcgatgacgttgttgtcgttgactgagatctgagatctgagatcgcaaactctaattcgacccacaaatcccccagttttcgttaccatagacgttctacaagaactctactccgtacctatcggacttcccctggtcggcataccacttacttagacttcgcgtgcactgcaccctagcgcacagcgaactacatgcaaaagattcgatcaccatatcgagatttacctccacaggcaaaactcgcaatgggccttgatcgtcgcgcaaagtccagaacaaggcggtgcggtcgtattcactccgcttcgactttctgagcagtcatacccgaagttttctcagtggacgttttcttcgtttgggaacatggcagtgctgatcctgtgtcctacttgttccactctctgaacgattgtctgcctactccgaagcgatcacacccttgaactggtatgacgtggtcccgagatgttggggatttgcccgggccgttttgcattattataacgcatggtaacacttcaaagttttctcttgcgattcacattagtctatagcttcttgttatgtagcctatccctgagggtctgacgcctagacggtttgctgaggggtgatggacgtcaacttctttccaaacaaacttgtcgctaggtcgaaatagaactctcaattctcgtatattgtttcaatcactagtggtaaattgcgtacagttttctctatgccaacacttgatcggaagagcaaaaagcaaaaatatcttccttttattgtacccctacgataattgataatcatccatgtaattagtatatgacgatgtaacttatacccttgctagaaagaatgccctagcgcgccgatatggtggaagcatttggatagccgcgaaaaaatatataaatgagatatcatgaagtcaatagtcacatatacagcgcttgaatgaaagaagaaaggagcgatgaaaacaagaaagaaaaacacaaggaggtaaggaagaagggtcaataattatgatgaccgtacgttgaagagcgatggtggtacaggctgcccgcatactcggagttattgtcggggtagaccgtagctcggcgctcttcctcggatagaagttccttaacctcccaagtgtttggcttgacaccgacggagaattccagatcctccttggtaatcgagtcccaaaactaaagaaagttagcaggaccaacgccataggcgtgaaacgtgaacttaccttgtagaccatcatgactgcgaggagattgcagaatgtagcaaagaaaaggccgtccaagtaatgctgcacgttgttgcagataacgtcactgaatgcatacaatataacctggccaatgatgaagacgaacacgccgaacgagatatggcctagtggccagcggtcatccaatgtgttcgcaactaggagcaattgcatgatcaaatacacagcgatggagatggcgttcagcaagtagagcaccacgaacaagccagtggtattcttgggacccatcgaaccccatgacttgaaagtcgccagcgaaatcagaaacgaaagagcgaacatcgctgcggaggggactcggatcaaccaaacggagagggctgtgccgtcttcgtacagctgaaagccgacgaacccgttgacgagaagacaggtgcatagcgcggatatcaaaccgttctgaacagccacgaagtacgggaacgggccacttcctggaggaacgacacctgcatcaataagaagcgagaaaagtgtcagagctaggtagatgtagaagaaggtgacgatctctttacggcctatttgtagtgaaaatgtcagctagtttgcgccgaatgtgagtgaggaggatgccagacgaaccgacggcagtaaacttagatcgaacgtgcaaaatcatgatcactgtcatgctaagcgccatgatatgcataaaggacgcggcgccctcgaatataatggtattcgcaacctcaatattccgcgcatagcagttagatatgatgccagttgacccggaaattgtcgatgccgggcccaccaaggagcacaaaggcacgggcgccttctcgcatatcgtgtcgaactgaccgaaccccatgatgtctggtcactaggatattgagtagtgcgacaacaaacagttcaagttccagtcgcggcgggtcacgaatgttgagtggacggtctccacaacgacgggggtgggatggtggaggagatgacggtatgtgcctcggtccccaataacagcgtggctctttctgcaccccagctgcactatttaaatcggctgatgcccgctgacagccaatgtcgaaggtcagatcacccctgtgtgaatcgttgatgcgaggggaagtgtctcagttttcgctttcaagatcacgggattggaatcgcctttgtaggtttagcgtcgttgctagggtggccccggggcggaacctggcttagtcattcggagatcggaaacgctagatccaaaatggaatagctcgaagagatctcatgtgactcgggtccgaactcggcccaagccgaactaccacgctagttatgtcaattatacattaaggggtcagggcacaataacacaccatccaacccaatttagaaagtcgactagggaccgttgggactatccgcatactgcaagctatcttatctactttttcggtctccacaagccgttggacttatgtgatcaagacgatttggtgctggtcatgattattggactgtagtctacggagtcaaagttggggttagatggggtttgtattgggcagttcacctttttcctttctctttctcttgttattgaattagacttcctctgtatgtggactgacctcttgtctccacacgaccctacaactggggcattgtcgcaccatcgtctactttgagactagggtttaccaatccgaggcctcacagtcatctgttcgccagaccagctcccagttaggtgattgtctctatgaatggatacaacgacgcaatcctgcagatgggatggcttgatcttgatccgagtgaatggtacattttgccacggacaaatatcgcctatgcagattgcctgataatcggcttccgagtcttcggaagcgattaaaatgaaaggtatccattgcatcaggtttcatctatagggcatgggttgagatcaagtaaccttgtatcgatcccccttttcttttgacttttgaattctagcgtatagatgtcataatgcggcggaaagccgttttctatataagctccccgatctttttgatgccatcaacgctactacactgatttgtcaatctgcttagaacactttatagcattcctcaggtgttttgtttcatgtataccactcatagtctgattgtcgaacagtctttgcaacattatatgactatcaaatgtgggtaagtcccgtcgatcctcatgtggcacagaggctcagacgcaaagctccctttttgataagaaataaacaaagaaaataaattatcggagcttatcaccggctccgactgcccaactcgtcctttctccggttttccaacaggcccaatcttgcacaatgttatactatcgacaccagactatctcccaacaagagaaatcctccgtgttcgcctgacccctggctagagagaaaaaaaaaccagaataagcagtgccaaggtgtttgacaatttggcttaaggtctcgagatttaagagactgccgaagatatttgtctcatgcatgaagatcccgactagcgccacgtgtgaatttaagaagcatcaacggctgcgaggaaccgtgtcgatctcccatctacccgatatttgcgatgttcgttctcgcttcctgacagtcccctaaacagaatattaaaaggaaaccaaaacaaagcaaaaacgctagaagaattcctctcaacggtcatacaagttaaagcctctctttatgcaggacccgctttcttgacaagggttttagggggtggagatggtggagagaatgccgtgcagtactcagtactgtatactacatctttacccatcctttagggatcgaaggtaaatttcgtttgaatatcttgggttttccattaattttatttaattttcggatttttatccttttactttattttattttatcctgtttatttattgccatgcccttgggcgtcatgacatccaccctccaaagcaaactagtgactcttatatctagtcgagcctccatctatatttttccgatttcctacaccttcaagattgatatctcatccctcacagttcaatctattacacagtgttgattcttttcattccatttactatctccccggtcatacttccatcgcagctggccagtttcacagatcaaaacccccctcgatgggatcgaaatgtgcaactttttcaaaaacttttacatatattccacttgctccaatcctgccgcccacttcctccgcaccgaaatggaggggacaaaagacaatagcacttgcaaagacagtccacacgaccgattcattgtggtggtgggcaaatgtgtactctgctcgtctgctcgatgattgcctaccatcattcgatacttcgggcctcagggtactcgaaataaaaatttcacctctgaaactcggtcaagggcattttctaaagtttaccatcccgcttcctcctgtccgtggtccttggcatgcaagactccatccaggaactatgtattcggggagagccgaccctccaccgataaacgcggctttctgaaaaacattcaacccttctctacgtgactatgatcgacaaatttataaaattcggcttctttgatttggatttgtggggcaaaccgtgccggtttaaactttgcttcgcggtcgacgcgttctccgatactttgtattattggcttttgaagcgttcatgtcgtcccgtttcattgtatctctttttccctattgtctttgttagcgtctggtaccttgtttgggagtctggtgggtttcatatatgaaacttagacgagtgaaccttctgatttttcaggctttgattccccgatttggagggtttgccctaactatggttcacttcaatgccttggtatgatccgagagctctttgcttctaatggacagggagctggaaaaaaatgtattgtacaagtactcaaccaattttcaattggtccctaaatcacatgcttgttggaatgctcatgcacgcggaacggatatattttctgcgacttctctgactggttcccaacaacgttcgggcccaaccgctcacagataggtaatgcaatccgttcaatctaactctctaggggccacatgcgcgacgtggttgatctctcttccatcacattccgccatgtctaggccaggggcaaaagggggtgtcctaacacagtgcggaaagacaaccgcgcacaagtaaaatgacaacaaccaagtgactagagagagattaaggtacctatgccgtaaaatgagcatcgaatggaggactcctatagttcctgtagtagggtcactatctacgaattccccctcgagcagcttcggctggtccgcttacacaagggttgaattttctccccgatcgagtccgtgcttttccatgataggatggacggaaacatgaaggattggaatcaggttttcccatctgttgagccatactacagggcatcatccatggaactagggacacccaacacagagcgaagaccacgcaatctctgcttcggaagtaccgattgaagaagtagagattagatatagtacacagccctccccttgcagggatgttatagtctcgttctagccatttgtgttctttgcctaagttagcttactcttgtcatttatacttgcgtcaatttcaccatactttcgccttacagccccgttattttcccccctggaactatattataagtccatgcacgatgccacgtgtaatctttgtaagggacctggggcaagggttaaatataggtagaggggtgaacattcataccccaagaccccaagaccccgagaagctattggctcgttctccctgggaaacacatccatgggcacataagagcttggggctttcgtacccgaataacccgaggtgtggatccacggctgatagatgcccttccgaaacagccttgggggggaccggcggtccacgcgtccgtccacgggtggtgtagctgaatcagtggagtgaaactaggatgcatccatggatcgtctattgcaattatttggaaccccacggagtaatttcctggtcgaactacggagtaaatatacggagtagtactccgtactccgtagtacaattgaattcatcgagaaagccctggaatctgctcaggtgaaaatgtgctcagtctgtttcacacgtgcatatttcccaaattctctttcctattagcgctagttcgagattttccggaaatgaaccgactattagagtttccgttggctttttttttttctctcttccacgctaagactgcggattcctctatctggactgtgttctgctaggccactgcgttgtcctgtaatccatacatacaatatgtattaactatttgcttggcttccgtcaattaacacagaaaatagctaaggcgttggcggtgaatgagcttgtgcgccgtccgtgcaataataagctgtgataccaatatcattgcgtatatagggaggagtacaacgtaatttatacactcacagaaagccaagtcttgttatttgttgtaccacccctgaagattatagttaggaactatgccgacggctgaatcgggtaagtggcacggataatgatctatggatcaaggtcaaggtggtttgtatacaatctacttcatatttattccctttttttgtcagggtttttttattcgccgagcctataatttatattacggctctatccctaattcaaaattaaaggtatgatgtacacggtccctcaaaagaccaatgtctagaacgttatgctcaacgcctttctgctaggctaacgtggcttgctttttcacatgttcatgaatactaaacaccaattgattaccatagcttaatagttcaacaaccgcggcggaaataaccacgaggagatgatagccatgattgtgatacgcgacatgtctataatttccacgattgagctaccgacaggggtctcatccttttggggggagggggggaatgcgcatctagacctgtatggctcattagcctctagaaaaaccgtcgactcggatgaatatcaatctccaaaatagaatattagaacaggtcgcacgcccttgttcttgctttatttgctcttgccggatacaggagcgacgaactgagttgggctggaaaccatgcgattcgtttatcgctgaatatttttaatcggaacgctttttcccctaataaaacactaatcttatttcctccgataggggtttctgatattttcttgattttatttgtatgttgtatggttcccttctatgatcgtgttgttctattcaattagactagctcgtggatatgaggcttagcatgcgaatccaacgagaggatgtcctcgaagaatcaattgagtaaaaattggtgattgatgtccaaaaagcccacttctccagcctatgtatgtccccggtcataatccacgcaccacgtgcgacttcacgttttacactatggacgagatatctgagccttgttaggcataatatcaacttcggcaacccaagaaacgtggccagatttaataacagacacaaaatagccaaagattatggcattaacaactgttcgtgtgcacatcgagtttttaaggttgagtcctgaagccacaaccggttacataccgggttgtgcctgagctagatcatgaataccagagcaaagtgatttgtcggcagtaaggacgagtcccggcatttctaccaatccaaactagctaaaacatctcgtttctttgctgagatggtaggcaatatccaaccgcgtataagcgtataacaagagcacaatacaacaaaatcccaaacagcatgcagaacagcccaatcaaaccacttttcacccaaaccttcaccccaatcccgagcccctagaaacgcacctcaggccgaataacaagcctcttgtgcacatatggcggaggaagagtagtatatctcacgcaaggcttgcacgggagtttttctttcgaggaaaatggcaaacttgggagatcgccaagatgtagactcagaatcgacgaggctctcttccgatcaaagattcctgatttagagcctagtgtcgaggctgagggagttggtgtatggcctggcgtatgctgtggcaagcaggagactgttatcagactccgaagatggtagaatgattcttcctcttcctcctcctcctcctcctctttttcttctggttgttccagcttaagttcgggtgctgctgatgggggctctgctatggcggcagccactgatgatagggcgctattgctcgatgtgttgctcacggtagctgcaagagcagctaattgattgatgatttggtctgcttcgtcgtggtgtcgtgttgtagtcatgattatcccagtttgatgaggttctttatcttgggatttgagttcttgggacgtagttggggaagtggaagatttgttcgtgtctgatcttcgtcgtcgggtccatagatttcttagcagagggagaaacatggtaacgattaaagaaaccacttaaaaagagatgtcagcttgtccagtgtctagatatgtcctcggagtacgcacagttcaagcgactaatcaatattgaatttatcagttatccaaaatccttcaaatctttaactagagatccgatgtttaaaatctagggttcccttctaaacctcagatatatatgtcctcggtcaacgcacgagcttgatacaatgaagggattcaacgagcaagactccgaccagtcggtgcaatacaaaccagactggatctgaaacaccacccagaatccgggatgatcagatatttcccggaagactaggccgttagaacttcatgaatatgactggatgagcttaaaatgtggattcggagactagtactgcccctctcgtttaggtgcatcaatataaacagatcaacatgcaagcatcctaccgtacggaaagaccctaccgaagagttgatagatcattccccaaattggagtgttgcaaacggatagattagtgcggatgtgtatcccgtagatcactatggcaccacattgccacaaatattagattcgagtaggttcgagctatcttgccccgtttgtggattgagagatgggtgggtcggatcgttagggctggtttataacggggccggagttaagattaccagggcaaattaaaccatcaaattaaaggatatgtgtccatattcttcgaatgtcattgcggaccggtctatgacatacttcgaatttggccatggaccgaaatcgtaatatgacctaagcatgcaagccgagtcatagaagcaaaagcaaaagcaaaggcaacagaatcactccgtcctcggatcccggaccatgcagtacaactaccaacaatcaaagtcagcaacaacccaaacagatacgagccccacaagcaaacactaccaaacaagtacaatgtacataccatgcaagcatccaccccatcccgacactccatctccttactcatgtgaaagcccatacgctcatagatcgccacattaggcacattcttcgagctctcgaggtaacacttgattccctcctcatccgcccgtttcgtaacagcctcaaacaacaatctcccgatacccatcccctgcgccttaggactaacagcgacaatattacagaaatagtacccgcgcggatcatcccagatagaagcctgcgcctcagcctgccgctgtttccagatccagtacctgttcgtgcgcagcccgccgcggccaaagtaccggatgttgttgagcatctggctgaaggatagggcccatgattggaaccaggagtaccagctctctggttgcgcggcagggtggggcgctagccagcaagagaccccgaggattggggctggggttagtgtggtgctgtgggatttggagtcggtctcttgggtttcttttgcaacgtagaagagtgcattcttgattccccaatggcagcgtgctgcgagagaatcgtagtttctttgcttgttgaactatacgtggagttatctctcaggagacgtaactgccggccaagttgaccgcgtcacgagagagatgtatgttagtctgataataaggagtggatatatgtctttcttcttttgcttttggtagcgattctcaacgcgcgacgtaccttggatgaatcgaaggcccacttgaaataagggtcgtctgcaaatgcctgctggattatctcaataacaccggggatatcagtctcggtaagaggcaagacttcaacagccataatggcggcttgggaactctgtatggcgggtagatgaccacaatttaggcaaatcggaagagataattgaaggagacaaagaaaaagcaagtcatggcagttggggaaccagacaacctcgggaatgtggagagagttggatgcgccttatcgctgacacatcagttcttatctctagccctgaagggctccagtgccagtttttatgagagtcgggatttcctggaaaggtttgataggtttaatacttgagatcattattcagtttatcacatgtatccatataaggtatctgactaaatgacccatttcgccttttgtccccgatcaacctcggggaatgaaagtccagtatcaacaccagccaaaaagtatagccgttcatacatgaatcataaacaaagtgctattaaatggaaagaatataaatccaaatataacccagagaagagaaagagaagaagaagagcccaaactcagatctgaagaatagatagcatagctggaaaacatgtgcctgacaccaatcccaatatgaacattagcgtaaattcatgattcagacctcgtgacagctttcttccttttttagaaaaaattaagaatagcagtattactggaaatagtcttcgagtcgcacccattcgcggggcacgtccatgctgcggttgacgcgtccacccggcgtgaggggtacatcgacgcggccacgaccgcggtcatcgtcttcatgctcttcatagaacgataaacgggagaaataatcctcgagaacggcctcccggtcgtccccgacaatggtatcgtattctggaggtggggtgacaagcggtggcgcgggagggacgtcctcgaaagcggggggtgcgtaggagggcgcacggagcagatgcattgggcgaggtagggtaggtgtgttgcggtcgtttggtggtgttgcaagatgtgcttgtggaggccgggcgagaccgccagaatcgttggtgaagctgcgggagaagttgtggcctgttgagccgcggcgaacgatggttcctggtgtggggcggctgtcttcacgatcggatgatgtcgctggggcgatgacttgctctcgaggtgcaggaggtgcgccggggcatccgcattcgaattcttgggctggggaaacgggtacttcggctggggttgtgtaggctggtaggtagatgttggcctgcgtggccttgcaggagaggatgtggaatggcgagtctatggagatttcgaaatgtcttcgtttggtggggtctctttcgtcgatcttcgaaagacggaggacaatctgcgtggatcgattagtatcattataaccaaagaaagaggaaagacttgacatactttgatccagtggttgatctgaatgttttcgtatgtggtatcgaaatgcagccgctgaccctcgtccctgcccttcatttcgtggcaacttggcaattgcacgttgaattccatctcagttggaccgacaccagaatcattcgacagattgcctagcagattcgtccgattccgatccacaacctcatccccccttgcagcagcagcgcggtggtcccagtcgataccgccgcctgcagtgacacgcatggagctgccaggatacgtgctgacactagacgagtctgctcgtttttcgaaaagcaacaccttcttcgctggttgcaaccggtgcacgctcttgtctgctgtccagtgctgaatgttctccgtcacaaagaccttgattcggtggcactctactttcgctagcggagttaacttgaacgcaattgggatctgtgagcccagcgggaaggacttccccgagatgacgatgtcgtagtgaagttggtcttcccagttccgcgaaatcgcaatcggctcgacttgctccaatgaaccctcggcaggggtacggatcacagggatttccatggtaccgaggagatttggtcggaatgcgcctgatcgttccaccattgcttctaggtcgtatctcacagagcccagatccgttttgattgtctctggcaatgatccgtcgattggaaactcgaagctgtataaataatcgcctacggggaacatacggtaatttcgctgtggctggggttgcgaagtcggaggttcgttcttgctgaagctgcgtgaatgtccgtggttggcttgtagagaaagacgtttgacttcgcggggtgttggtagggcgagtgaggcggtagaattgcgattggagaatatatgtagttctcgagttgtcatcgtcactccctccttgcctggtacggacgacaccggtttggcatgctgatagtaatgtgcgccatagtcattctgcatgagcgcggtgtcaccgtgattgaaatagaccacaccatgtgtgacgagatctttcttatcatggaagtggatcttcctaggaggaatacctgaacaatgttagctcatgttcaggtacaatttgatgctgtagattctcaccatctggccaatcggtttgggcatggccacggaagcagatcgagatcttcttgatcttgacacatttggtaatcttcaaatgcatttgcccccgcagaattgcagactttttactgcttgggtcttgctgatcataaccctgcaagaaaagaacgggttctgtgagggcaatcccgacagaaatgccactcccagtggctacaatcttctcatttcgcaagggagtaaatggggtggtagaatcggtattcacggtatggggttcatgtactgagcgaggcagcacctcggtggacgatgaatccgatcgcatctcgtcctccaagtcgaccgatatcggcgacaatataatctccgaaactggtcgtacactaagacgttgcgaaggcgcctgaactccagacgaccgcaagcgaaggaatcgctttgcgttctcacgtgggcgcgccagctttttgaagattgagtcccgacgactccgtttagggatctgattttcaatacaaaccgtgtggcgacgaggcgagcgagtgatgagattggaaattgatactcctagcgatggagttcctgtgaactccgagggccgagtggggttgctagaagccgaccgagaagataactgcgctggcagaggaaggatattagcacccatcatgatgttatttgtctgctgagcatcgccgaataattcccaaaattgtacgtatatcccttggatacgcttgtcgccaaattgggcaaaacacaagcctggtcttccaacaagaaagggaatacaaaagtgcagggaatgtgttagacagattcaacataccttggatctttaatcttgtgagacgatgttttcttttttttttcgtcccttgaatcctttcacgcaaggagactgatctttgtaggaggatggaattctcgggggtgctgacttcataagcaatcctccactctgatcatcgtgcagatctctatttcgacgtgtaggattggctgttatagtgcggaattgtggctccttttcccttttccctttttccttgatctctatgactccgctcacaaggcgtatgtggcgtcgtatgtgattgaaaaaggtccgtgaatatagttagaaaggcgaactacttaaactaaaaagagtcctgatccacggaagcgaaaagaagaacctgaaaagcaaaatataaggtgccagaggagcagcataaatccgaactcgatgacaacaccattgagaaagccggggggagagacggagcctggtctcatatccggcgatccgggccatacgtctctaccatctacggtttacggattttgctcggcatttctgtcaatatttgtggagaaacattccattggggtctagagttataaatgcctcggatctcacggcctatacaaacggcttcacggattcacggcatagggcagtgctagcgcccagctcttggatatcttggccttgttgatctacataacaacttagaaaactgcatctttagttgcgctttaatcactctttttatgactttatttgatacgtttaggactttacaccagatcccatggattttgaaaccataacaaatatgatatgaacctagacctttgcatttcttaaatcctcgtatatcatcctccgcatgacttacttatgatttccgtacatggctagttactccgaagttgactaactacctagttagttagttagttagttacagtaactcgttcagggcctgattttcaaggttcactgcacggcttacacagcttagggcttaggtggaatgtgaatggtcggaagatagaccccgataaagatggtgatcagttctagttcgtcaccatcacctatgtgctgtacatcgtaggcacatcagactattatactaaatactactggcgtgacgacatgtccatcttacgataatgacctcatccgccaccttatgcctagactctactccgtacatatataatcgtatagagcagatctatttcgggaagcaaatgccttcgttctctctggggtgatcgccctgtggacttctctgccctgatttacttccccacgagccgcgtcgatcttgaactacgtcactagacgtatagactacatagtatatttagtggcctagggatctcttcccacaactatcttgtaagcacgtattttcctagaacccaaatcaggcacagggaaacacggtcccgattcaaatgtcctgtcgcacaacgagctctgcttcaccactggaagggttcatgcgttcggtggaggctgtctaggagctgtgggcctggatcatggtggtttcactatcttctttcgaagtgtcagaactttccttattttttaaaaaaggtcaaaagacattgattctccatgaatcatactcctaagagctattagctaataattgccgtatgtatcattaatgttccacagcagctacccagtcagggggagccttgaacctgagtaacaacagatccacgtacctagttcataataatcaatgcttccagtcacagaatcagggcatatgccattagatttatgcttagtaccactagtgccaaacgcgaacgcatgcagctagctcataggataccttttccccttcccccaactcccccaactcctccactttcccctcactagccgttgctcttatccagactgtatcaatcccaatagtgtgcccctcattttcatcagttgaaccaattatcatccagctcattacatgcgttcatcaggctatccccttccagctgattgaagtccccattattctctccaaaattatcagtgtccatgaacaaatcgtcgaagtttgattcagcgggccccatgaaatcctccccggagttaccctgtagaaaattgccgtcatccccttctgtcttctgtaactccatatcaaatgcaccaccactagcagggacatccgaagtattccccagaggttgagtcgtgcttaacctgtccgcaccaccagcagcgccggaggctgtgaaatttgacccggataggaaagcttgattgcccatgtcatcatcgttgaagtctaagctaagaccaaactcgtttgtgcccccagcgttgttgaggactgaatcaaaagtgagatcttcattgggtccagggggtgattgacggggagcattgttatcgctctcatttttgacaacgacatcatcgcctgattgggtgtcgggcttgatctctgccgctgattggctcacggagatagcttcttctgatttaggcatagtttcaagctctgtgcccatttcgactttctcagtcgggggaggttgaatgtcaggttcaacctgttggttcacatcgctcattgtcacatcttcgacgggctgaggagcggcactagtggccttgagagcctcgtaatccctttccaaaaaggctttcgcgatgaactgcatagggtcagaaatgaaaagggaacccgaaaaaagcaacaaaaaaaaagcaaaaatgagtatatttgagattgttgatatttactcacaatttgctctgataggttatccaaggcattttggaagctatcatgatacaacggaatggatcgttgcagattgattcgcgacggcatggagccagacttgcgaaacaaacgaccggtatcaatgagctagaaggtgtcagaggctatatgccaagagtgatgttccagagccagcgcttaccgtccgctctattatgcttgagagctccgtaagggattccgggtttgaataactagttgaatagctggccatggttagaatatgggaatgtgaagacgagtagtgtagttttccaactcggacgatatacaagttgaaggaagaacttgggagaagttaagaatttggggagaccggagagtaaatagactaaacccattgaggtaaagtgtcctcccccccacccctagcggttaacttcctccctttacctttgctcttctccagttccttttttttctttctgtatcctcaacttctttccagttccctttttcctttttctcttttctttgtttggctttcccctgtaaagggacttgcatttggttttcttcaagctttctcagcctcttttttgttgggctttctacccttccaacgcgctttgtatcgtttcaaacaaatctccgaccgcagctttatcaggccacagaaacatctcccttattctaccggagctggatcgaaaaaaaaaatccaaaatccaaaaacaaatccccccccctcaactcaggttccatctcggtgtctctgttactagcactgtttatacccggtgctctttgtttccccatcttaggaatctttcttattggacttccatcctggtcccccgcggcctcctataccacgtatatttccccggtcttatttgcgatagtggctttcggcgacgctctgcattgtctcaaattccgaatttgacagatcataacactgggctctcccggtctgacatttaaccccgtccgacttccgcatctttagcttcctctgatcgtctttgggatatatccgtatcttttcaaaaagcaatcataatggctgaaaacgctcaagcctcgaccccctcgtctcttccccccgcgcctcaacccgctgtcggtcaagcccaacagtacgatgctcctcagggcaatggccagggcaaccagtcccatatgcccccgcccccgcgccccccggtgataattccccagaataccaatccgattcccaccgccatgacctctcccatgtccggagttgatatgatgtcccccacaagcgctggtggatatgtccgccgagcggctcctgaaccaaacaagagagccctgtatgtgggtgggctggacccgagggtcactgaggacatcctcaagcagatctttgaaaccactggccacgtggtcagcgtgaagatcattcccgacaagaatgtgagttctcctgacagacagcccccctgcatatccgccccctgagttgttggaaatgctctctggagctcttatctgggataccattgctagtccttgatggaatactggttgctgactgttttactcattccaggggcaattcaccaccaagggccacaactacggtttcgtggagttcgatgacccaggtgcggccgagagggctatgcaaaccctgaatggtcgcagaatccaccaatcggtaagtttcctttcgttcctggtattctgtggctgtatctaattgcctcaggaaatccgtgtcaactgggcgtaccagtccaacactaccagcaaggaagatacttctaaccacttccatatcttcgtcggcgacttgagcaatgaagtcaacgatgaagtcctgactcaagcattctctgcttttggttcagtatccgaagcacgtgtgatgtgggacatgaagactggtcgctcccgtggatacggcttcgttgctttccgcgaccgcgcagaggcagacaaggccctcaactcaatggatggtgaatggctcggttctcgtgctatccgttgcaactgggccaaccagaagggtcaaccttcaatctcccagcagcaggcactggttgctatgggcatgacgcctaccactcctttcggacaccaccacttcccaacccacggcattcagagctacgatatggttgctcagcagactccccagtggcagactacttgctacgtaggcaatctcacaccttataccacccagaatgacttggttcccctgttccaaaacttcggctatgtccttgaaactcgcctccaggccgatcgtggctttgcattcgtgaagatggattcgcatgaaaatgcagcctctgcgatatgccagctgaacggctacaacgtcaacggccgtcctctgaagtgcagtgtaagttattgctattcctgtgatttcccggcttatttactcactatcgcagtggggtaaggatcgtcctcccaccggccaattcgacaacttttctccccagcagggcaacgccgctcccttcaacaacagccctgccggtttcttcccccaatacggtggtcccgcgaaccccatgaatcaaggtgagcctagtattcgtcgtatctctcggcactcgcttactggtgtaataggtcctgcccctgctggtcgaggctgggatcaacaacccaacaatttcaatggacctgctatggctggccagggctacgcccaggcaggtaatgccgggggctacggccgtggccaagccatgtccccgtccggcaactgggaccaatccaccaacttcaacggaggctaccaggcgtagctcgggttttgacagtctccagtcagtctgctcacatacgacacttccggcattttctcacagaactaagtttatttaacgtcctttctgtgtttctttccatagcacccttctacaattccccatcaccgttgatattttctttcttttacctaaattgagtggattttcaagcgagcaagttgcttttgtctgaaacggaatttgtgtgttgcgcaccccataccccaagtccactatgttgatttgatttttctctttacttcttttttctttttcttttccttaagcgtgccttgctatcaaggattctttggacttttgttggctccgtcacgcccccccaaataaaagcgacctccctactcttcacccgcgtatttggactgttgactgtttgttcatttcatttctctagctgttttatcattcgagtacatttgttgtatcagatttgcttccctgtcttttcttaggcttgctttctttgttcgatactcattccactcaaaagatgcttttcatgggttgccatggattcctcggttgacacattggtctgggcactttcccacgagtatccgtatatgctgtgatgaatttctttggagcacgcgacatcattgatcttttttctaaatatctctgccttgctggcgttctagcccagataccaatttgcctttttttcccctgcattttgcctttccattgctttaaactcattgccgatggcactttctttgtttatttttatatatactatgtatgatgtgcagagcagacggcggattgcatgatattatctgcctataggctcgcagtgaaactaaatatgttgtgttatgctctgcggggcatttgaagtcgaaccggtttcatagcagttggtatctcattgtagcgttggttgattggtaaaaccgcaacccttctcttgctgcacatgtatgcagtgtgacaatcagatgtacggcatgttttagattgggataggcaatgtacatgctccatcctttttctattcctctgaattttctctgtactcaactggaaaaccgggatcggatggttatttactaatcacgaagctataactccgtacttatggatatatgtgcataggtattccggctttaagtattctatttactctttcaattaaaagacaccataaaagacatgaaattaaagcctctaatatagtatcaagactttgcagcattaccctctagccgtgagaaaatattgaaggtacatactgggaaggcgaccgagttaagggaaagtgcctctcaaattgatgataagatccaatattattatataaattattttactccatatcttacctgttattgctgatactttatatgcactagagacataattcaaggctatttgagcgtgtgtcgccgctggcatcgcaatattgatatacagttacattgttggtgcctgagatatagggctacaatgccactcctttacggccctgtgcaggtaacattcatggatgtctttgcaaaacaaaaacaccaaacgagaaaacacagattccgagtttcaccaagcaagaggattgaccgagctgacgttccagctctcggttccactcgcactaatggacgatgacgagagaaccgcggacttggcggtccacgaagtatctcctcgcacgcgatcaggcagcgtaagtagcggccacaaacgaagcctttcgggttccctcctctcgagactttccttccttcgcgtgaaccaggtagcacacacctccctggaacgacaccaccccggtatggatcacgatggcgacgaagacctccactccggtatgccgcagaccacaggcaagggaggaactaccagcagccgggcaatgtctgccgctctcgcacaacaccgaacgcgccgtcggcgtggttcactccgcaaaactgcattgctaggcaccaggctcgaatcgcgcgacaaaagagccaccgccaaagccgccgaagctctcgaagccctccgcgccgaacctagccgacttcctgccgccgatctacaagcggctatacaactaacagatcaaaccccctccgataatgggcctacgcgatactcaccgcgcgagagcggggccttcgacgatgaccgcgacgatacccaacaaccggcctggttcagcgcggcaaatacccagaaacccattcgaccctcaataagtcgccgacgccagggcctagcacagcaaaatctccaagaacaagcgaccgacgacgaggacctcatctccttccctcgcctgcactcaaatcccacagcggccgacacgggcaccagtcctaaaatcggctctgcaactggcttgcacatctccccgccatcctccaactcggcttctttttattcgctccaacctcagcccgaaccagcatacctgcccgtccaccgacacaagtcctcgcccctggtcacacatccggttgagatgaagagcagtcccgatgtggacgtggactactccgagaccgaatggtggggctggattatactggttgtgacgtggctagtctttgttgtgggcattgggagctgctttgaggtctggagctgggcttgggatgttggggagacaccctatgcgccgcccgagttggaggatgatccgactttgccgattgtcgggtattatcctgcacttatcattctcacggctgtcatgtcttgggtttgggttgttgtcgcatgggtgggtatgaagtacttcaagcatgctaatatatccggggaggatatttgattttcttctcttgttccagcgcataccatattataatacccttcttcttgtgagcgttaaatggcataaattccgtggggttttgtggttggctgacagtgttgacaacattcgatggtcaatacatatgggctgcgcaaatattgcagctatattgctgccactgcactatcagtttctggacatgagcgacaaagaggtataagcatcgctggaatttttcccagcaaataatcttgttgtcgtggcctcatatgtacggccatctagtctataaactatgtacatactgaggggcatgtataaatcacaaatttgcaacgtccaacttcctcaagcgcaacatactatcctgcaaagaagtcgctagcaacgtcccatcagggctccaaagatgactctcatgcgtccccctgttctccgtagcccgaggtgtccaaccctcctgcacaaaccacttcataggcaactcactcagaccgccaacaccgccatctccaacactctcccaatcaatcatccgcagagcctccccatgctgatgcacaataaccgtaagtgtaagactcgccatctcagtccagtgcttgatccccagcgcgcgcggaatcaaaagaagcgagtttttatcactggaatacatatgcgcacacgcatacaaattatcatattccccgttctcttctctctcgcggatctgcgccaaactcgcagcagggtcctcatccggtgatcctttgagccggtactgcgttagctggcgatatcggtcagggtgttgcttgacatcctcggtgcggttataatccttcatatcagtcttgcgcacgtctagaccgggaaactcgtgctcggagatgttcccctgttgcacggcatcgatccaccaatctgcgtccacgctgggactgggaggctggtcttctggtcgttttgccgagaggattgagtcgaagcgcgcttgtgctgatttcggctggtgctggaagagacgctgcttctcatcccgcttgaaggagcatatgcacgagaagcagattctgcctgcttgtctcgcgtcgacggctcgtgcgctgtacatgaatccatcgcggatatgtcgcactgtgtacacgtacggcgtgtcgagccgtcccgctaggatgaatgtacccgtcatatcctgccgatatgtcagtttgaggttctttgagggaaattcatgtataatatcttacgtgaatcactaaaccccgaccgacggtcttggacgctgcataggctgcttgggcgtagacatgtccgccgaacgagcgcgttccttgaccaggattgaaaggtattgccagcgagcgaaaccgctcaatcttctctggtccggtggagtcgggatacgagatcaaggcatcttcgagtcgctgcagcgacatcaactcggtgaaagaatgcggggaagtcagctcgccgtcattgtccggggccctgctttgtggagacatagcgcgaaagaggcgagaggcggtttgatttaggcccttttcttcccaaagagtacaagtagtgtgaagcagttgcttgtcgacaagggtgattgttctgcgggctgatggtacctgtccgatcaataacaacggcctctgagcggtcgtggtatatgaaagtaggattaaggatctgagccttatacagtattctgttctttaacggaaaacgggtaggattgtcttgtggggagtagaggtgaatagatttgataatggatgtatggtgattggtaccgagtacataccccggactaagagacgggaccggccggtgcctcggcttgtcagtttgactcacgaccctacaataactaaatagttcctccgtagttagtacaaaatagggtgaatgttctaagtgtaaatatttcgcataaagtaactcattttatggcttctgaatcgattatctatgtacatatagcatgcttagtccaaattcagcgttcacgactgatcgggtgaatacatttcggctggagcgctttgcttcaggtttacataaatcgaaccatggtggcgttcacagggtacggcatgtcgatctctatatatacgttgggttcctttgccatgctcgccgttgccatctttcatggagtcaagaatggagggaacaggaattgtatagtaacagccacaaaatagacttgtagatcaaactggtattttatacaatatgcgccgattttgctgataggttcgagtggcagttccctatgcccgtgccataataatacaaagaacaaaaaaaaagtgctggaaactaaatgacgctcccaaatctgatatcaataatcaaccaaactttcgtcgaaaagatcacgtcgattagatctgctcggtaatggtggaaacgttgttccactcgaccttgccctcgatatccttgatctcttcgagcttgtcgccgagtttgaccacggaaaagttgatcatacgcgggtcgaggccgagagtacggcggatagatgactgaacagagccggaagagtcgaagcgcatgatgaagtgatgaccttcagtgtatcgggcctgatgttttgtggtgaccttgggcagacggaaggcaccccagttggtgtagccgcgaacgacgccaccggagcggatgacttgggtaccggcattacgggcgattctgcagtaaaatcatctatattagtattcgacaggttcggatgatggagaccgcggcgatggtgttggttcaaacgtactctcgcacctcgttgaggctgcccgggcggacctgttagcagagcggttagcaaatccaaacatttctttgagtgtcaatatgacagtttcgatggaactaaagcatacaatggcaattagctcgtacaacatggcatcgagggttggcgcgaactagagacagaaatggagcaatgaccatttgaagccagcaaaatccgacgaggttagcgcgttgcttatcgtagtcttggcatttcgttatcggggaaatgccgtcaacgaaactccgccggagaagcgcatcaccttctttcccttttacttaaactctctcctcttctcatttcactttccacgcttctcattccttttccctatacctcaaaatgtcctctgtcgctcgcgcaatccgcccctttgcttcccgggtcatttcccagaagcctcttgcatccgcctgccaggtttcgcctgctttccgtttcccgcggggaactaggagcttctcccaaagccctctctgtgagtactatgaacacccaatgctgttaatgctgtctaggacgatgtaaaacatacttggaccggcattggagcatcaaaatttatcaaacatgctctatgatgttacattttactaacggcgcaccaattcgcaattatagcccaggtgaagaagtacacagagtcgcacgaatggattgagctggccgagggcggcaagactggttagtgaacaaccacctcgatcaattggtctcatacacctgccttccatccattgaaccggtgccaggtgtatatggcctccaatagtatacagaatatggagcagcgagctaactaacagactctctacagccaagatcggtatcaccgactacgccgcccactccttgggtgatgtcgtctatgtagagctccccgaggtcgacctcgagatcgttgccggcgagcccgtcggcgctgtcgagtccgtcaagtctgcctctgatgtcctctcccctgtttccggcaaggttatcaagggtaacagcgtcctcgaggataaggctaagaccatcaacgagagtcctgagggtgagggttggatcgctgagattgaagtcgctgatgctgctgagctcgatgcgttgctcgatgaggctgcctacaaagagactatcgatgcttaaatttgtggagtgattgatcttggttcgtaatttataaatgcctgtctggagctagatgtggtgaatttcttctttaactgatgttatgttgtcatgtatgaccaatggtgaccaatttccttcaacgagagcgtttagatcttgtcgatccgtttacggatcgacgaactattcaacaagatttctgtatacgtggacggatagttgttttatttccttgtagagaaaccatagtccatatatctaggtggatgtatatttagagctagatcacgcatgtcgcaatagtggaatgcaggtctgtgtacaggaagatgatatcatgtatgagaagcattacaacataagttatacaggaggtatggattcacgacagatcggacattggaggcgaagtctcatccagctttccagacaggcagtgtggaatatatgacgacaaggagtgaccatatatagccggcgactcaagatgcttgcggccccatcggtgacgctacttccacccgaagcagaaggcgcgggaaggacaggaacctcgatatcctgcatgcaaatagcacagtcgaatatggccttcttgcggtctttccgctgcttatcatcatccttcgaatcactgactagatctcgttcatcaccgcgcagggatgcaatcgacagaacgccaccaccggcttcgagatcctcgtccgctccggataaatcgcgcagcatgggatggtaatcgtatgcatgcggtgcccagccacgaggcacaaagaagcgtggcccgagaacgtcctggctgaccaggatccatgcttgaatccacacccatccagtcatgatgaatgcgcttgtatagtcggggcggataaacaacacgtttccccgtgccgtgaggaagtacaagaatgggaagagtcgcagaacactttggccggcaacaaagtcccaccgaagagccttgcggcaatttctcatcgcgttgcggtagacctgtggaacccagaaggagagatagactgctgccaagaagcgggtgtatattgagccgagacgtctcggcaggaggaaagcccagattgacaggatgagcatgccaaatagggtaagatagaaccgtgcgtacattgttcctacgtcgctgcggatttgccttggagttgggggagtggctcgggtggttggcggcggcgaatccatctcatcgtcgggggcatcttggtcgggtgacaagatgattggggtcgctcccgagtctcgtgcttccgaagcagtggcaggcaaaggcaaagttccagggcgagttgttggagttgatggattgggcggacgatcttgctctcttctttctggctcttgcactgcccatatttccatcatgaacttcattccaatataactcaccgacaggaacgccaaaaatgatgcagtagccaaaactaggaaagatactgcggcatatagttccaaaacaatgaatgtcaaaacaaatgcatcgccgagcgccatcaatgcgatggtatagaagctgatccgactccgggtagaaggagtcgaagcctctttgatctgtcgaagaagcagggtgatctgtgcaacaaaaacaccagaaaccacaaaaatgagacgagatgcatatttactgtactcttcatgcttaggcccagtcacatataatgcatcagaaggaggaaactcaggggttcctttcgtttgaagtatgtacccgcagtctggggagaagacaacagcagacatgaccataagaggaggatctgggattggcgctcccataggatatctgagctcttgctccatacgctccaataacaatcggtcagcaacggcatcttcgagcatgactggatgctgctgcaagtagatgatatgttcacatttaggcgcagggaactccatctgctctgttcctgtcagagaggaccaggggaacagtgttgggggtcgattttgcttctccgagatggtgtccgacagtgacttgagaagaagctcgtgtgacaattcgtaagtgtcagaagatagcatgaaatgcggcaacgagaagatgccgccaaatttctcactggaagtagtcaaaacgatacttccggtgtctgggaagtgtacacctaacaacgagatgtaccaggtacttccccagaagtcctcgctctcgaccgtcaaactggctcgcatctctctcaaaagtccatcgcccatctgaagttcttcaccacctccctcttcaagatcaaagtaaaaggtgccgctattgccagtgatattatgactgaattcatgagtaaagtattcgtgttcttcagcgatggctgtcgtgttcagaggttcacggcgatgaacaccttcagttcgccgaacccagtccccccgcagcttcccggttgagttgcgatatatcggaagcagaagcttggtcaagttcaaagtaggcgagacaatggggtcttctagaccgtccggggattctagcccggcatttgagaccgctgattgtaactggtggcgagccaggcctttgacctgcggaaaaaggtcccaagcatagctgtcattccctcttgaacccgaaaaaggaagccatcgattggcgggcggatcgaagtcgccatattttgatccattcaataaccgaaggacctgtcgctcatggtcaagctcacgttgccgtgcccgatcttcatcgatcaatggcggtcgagactgggaactgaagagaaggtagaacaccagcacgaagaagaaaaaggagccgcggttatccatctatgccacgcagtctcggcatcggactcttttctcaaagacagacaataagcatcgcgataaagagaaaccaaaaaaatgcgagaaggaggcggggagctcggctaagttacagagggaacaaacagaaaagaactaatgaatgacgaacgcagtataagaaggtgtctacggagcggagttgatgatgtactcgaccccggggagcctgcccgccgggcacccactccttgctgactcatgacgcctcaggcatgatggatggatcgatatcaaccctggaaacgttctacttcgggatttataccccgtaaaattaaaatagagatgaacaaattgtttcttatctgaccattcttagccagaatttagaacagaccaaaaagataaaaaatgccaatgcattttatggcaagaattgtccactaaatgcgaagacccgaatgcttgatatcaaaccggttgaattttggtacaaatagaaaaacgcatacacacaacgaccatctcaatcataatagctctgctttatgatgcagcagccaggacaccaccctcgggcttcgcatcccgccgccgacgcttctcgagaatggcctcacggcgctgtgcaagcatcttcaattgtctgctctcaacaccctgaagccagtaaccaaagcttccaccaacaccggcgaagagaggatagacccagagggattccttggcaaggatcggacgcatctcgataccgagttgccaaaggcggacggcaatgcctgtcggatcaacacggttagttccaatggcatataaataacttgaacaatcgtgctaccaagcagcgtgctcttgtgatagattgaaagctggggaaggagatgtgacgtaccgaagccgccccagaagagtactttgtgaaccatgatcgcggtcgagcgcggggttgtggttgtaattcgggtgctgatggagatccgagaaagattttgggaaggcggatgggttggctggttgattcaacaccacagcagccgggataattgggggcggagatagatgttgccgtcgcaatagtccaggagagacgaggttgaagcaaatcaacgggccgcagttcccaagcacggaacaaccattcttccggtcacacttgttatcgcttatcgctcgcgcgacttcgacttccccaggccaactatggcttctgatgaggcaatggatgattctacagctaaacggcctattgatattgagagcgtgaagcgcaagaagttcaagaccgacgaccttcccttgtctgcggcgcaacatgcagtcattgacaaactcttacattcattcaagaagaagggtggctttgatagtgtccgaaaacaaatatgggctgaattcaatgacggagtatgatatattatccacatgttttttcgcaccatgctaatcctatgcgaacaggaacttcgaaccgagtttaccaacaagttagtcgcacttgcagagtcagcgatcgatcgcgagccggcactgctgtcccgcgaaagaggaaaggcagcgacactcattgagggcgcggtggaccgcggtgatgtctacaagagcgtggaggactccatcgaccaattagcatccaaacacctggatttcatcctggaatctgttcgtgagatccgatgtcaggacgttggagaggaagtggctgcccgtgaactcgagctagggaacaaaaccgatgcagattatgaagcctacgtcagcgcccagcgggaggagcgggaaaaagtgtggcgcgaagaggagcgcaaacagagagagattgaggaagaggaaaaacgcgtcagggatgaagaacgcaaaaagaagcgtgaacttgaacgacagaaagacgaagaagaccgggcccgaagaaaggaaattgatgaacagaggcgagctgatcgggaacgccaacgcgaagagcaacgaattctcgacgagcagcgagagcgagagcgagaggaaagatacgagcgacgaaggcgtgaagatagggagcgatatcgaggctgggaccgtgaccgcagtcgaactcgagatagagaccgtttccgtgatcgctctgaccgtgggttatcacctaggccccgggattcaaaacacgacaagtcatctacatcgaatgttcccactcctgtgctaccgcctcttgtggatgagaagtcactcgaggaggctgctttgcaaatgctattgaaagaaggcgaagaacttgcagccaaggctcgacagaagcccgagtttgactttgaagaggccgaggctattgagaatggactgaaaccgccagtatcagcgttagggccggccaagactgccaatgattcaaggttttctaatacatctacgagagcggccagcatatcccgagatgctaacacgaggcgtggttctcttgcagaccggggtgatcggtcccgacatttgactcgggatcgaagccgtagtcgctcgcgtcgacgacgcacctcacgttatgacacagatcgccgacgtgaacggtctcgggatacttctgtgaggtctcgagatcgtgatatggatgcgcgccgtggctaccgcgacttccgggatgatcgaggtggtggaagctacagaccaagccgtcgcagccgcagtcgatctgccggccgggaccgcagtgttggccgcgaccgagaccgcaaccgagaccgagatcatgacaattatcgtcctcggcgcagtcggccctctcgctcacctgtacgccgacgttctcgcagccgctcgcgctcgcacccccctcgtgctcgtgaccgtcctcggtcacgttctcgatctactcgacggcgatctcggtctcggcgtcgctcgccttctcctactctagatattgaccgctacgtgccctccaccagcaaccggagcaagtcaccccgccgccgggtccgatctccggagcgagagcgagaacagcgaccccgtttagccgatattgaccgttacaaaccggtatctgaacgagataagggttcgactcaagcaaaagagggagatcctgaggttgacatagaaaaagaaaaggagaaggagaaagaagaagagaaagagaaagagaaagagaaagatacagatgatcgccgacctcttcgacgaacccctagtcgccgaaggagtcctagccgacgaagaagcccaagtcgacgacgaagtcgcagccgcagaaggaaccggagccgatgatttttatgcaactttgccatgtatgaaaagaccagggagacttctgcttacaattagaaaaagattttcgggattgacgccgaaaatgaccgcttttgaggccagaaacggctgcctttacacccgtaactttggaccactacaacattctacacccgcccagcactgttagtcatcctctagccctgatgttgacgctcgacttgtacagttagttgttccccgtatttccaacaacatggagccttcttccatacgtagccttatcatctttcaaaagaagggtggtaaatggttaaactgcttcgacccggacggttattgaagtgagtgcgtctaaacgggcgaggaaagaagaggaaaaaaaaaatagagcaagctcaaatgtgcgatttgactagatgctcaccacgaagcacccgttcttattaagaccaatgctagtgaaaatgaatttatcgcattctattgcggtcttatgcgatctctcctctgtgcccaagactgttgtgatagttttcccattcaatactcaagtctttccttttccatccttcgctcccaaacgccaagcagcaccgaaaagctagcaatagttctaggtctggggcttcagctgttctttcaatgtccatttgtcacatctgtggcccggctggccttcccgctcatcctgtatatcctcgcagcgcctgaccagcagttcaaacagacgttatatttcatccaactgttttgcttcccgcgccctcccctcagttgactctaaatgactcgggtcaggacaaaagtcggcatccatccaaccacctagatacagcacccagcggcctgacattgtccgcgcgggaaacacgaagtcatgtttgacacattatgccacgccatggctgtataataagagacagaccgtgtgaatcagcagatgctcaggacttccctttctagctcgtactgctgtttggccgaccttagactcatgggtaggggcctttacgacggctcccgttaatacagcacgatgccctatagttgatttgtggcgatggcgatccggcttctgtcgctgtgataggtctttcttggagaagacttactatgtagtaaacttagggggtaatacttcaactatgtattcccaagatcacatgcatcgatatcagataagcttatccgttatcagttctccacccaaaaaaagttgaaaatgcccagactcgccaacttccactctttcaagacaaccgaagacactgagatcatttagccatataaaaaatttgtatattggcacgcatccaagttgctaaaccccacatcagcgcatcacaatctctgaaaatctctgctacccccagcgaaccacatacctccaacatcgaaaccatgtcaaacgcaacgataagatctgaggctgctgcaagcaatccctctccacaatctttaaacctagcagaccgcactgcgccccgtcgacagcgcgccagctctattcaatcatctgactccgacccaacctcctcctcgggctcatcttcagaggatgacaacgagagcgaaagagaagacaaacaacactccgaccaagaaatgaatggcaccgaggagtcgaccacccatgcaaatgcctctgatccatcctcaataccccacatcgccggccgcccgaaaccgcgcatacatcgtattagaggcgactcgggacttttgtcgcggctcaacgctttcttgccgaagatgaaagatgcaaatgagaatttgcaaaagcagattgaggctggggaggctggagatctggttctcgataatgcggacgaaaatgcagagcaatatattgagatggtaaggcttattgattgtgcttattgattgtgatggggtttgctaatggatttaggatcttggtcttggggttttggaagagaaacgcgatggtgattcttcgagtgatgaggagagtgatgacgaagggtctaatggtgtcactggcactggggagacccctcaagagatgaatgactcggatatcattgggaagcttatgggaggtaagagtaaaaagttgaatacggacaagccgtctatcgaggagatggcttaataggcatttgttcgtttgatttagtggtgggttgcattatttataacatttttggtggagatgcgcggtcttgattcaatcacgattgacattcatttgcattatcttgggctttgtgttatcatttagcgtctaatgcttttctttttccctctacagaagtggcccagaccaatcgcgtgcacaaagacacatacattcattccctttgtatgcaactcatcaggaatcaagtctagataaacagatatggaagaggaaaataaaactgtaaaacaaaacatgagcatatcgcggatccctatatatgcatgaacccatcatacactatgaccgaatgacattattaaaaagtgatatattttgcgtttcaccatctcgtttcttaggccacttccttgatgcggcaagtccagccggattcctggctcagaagaggcaagctgcagcaggtcagtatactgattagaaagggacggcaaggagtgaactaacctcgcaccaagacaccaacccagctcgttgtttttgatcttcttggctatcttgacctcgcgggacaagggaatttcgtaaccggtgtgcagcagaaccgtcatgaagctaaggtccatacaccattccggacgatcccgaagctgtgcaagcgcattatcctcaccctcgaacttaacactttcgaacgccttccattcactctcaccagcacaaacggtggaggtcagctggttaagctcattcagagtgaaagattccggcatgccaagtggagccgtgcggtcgaagaaataagagaagatgtacaagtcctctcgagcgaaagtctttgcgagagatggctggtgcacaccgttgaaagaacagggtgcaagcttacactcgccgctcttcttcaggatcttctcggcgatagcacggcactggggggtcatagacttgtccttcgggccaaccatgctcacttcgacttcaggccccagcggatgatcagcggggaacttcagctttactgtcttggtcattcctgtgccaatgcaggggttggagataggctgcttaacccaggaaaggtccttggggctctgagctagcatcgcctccacgaccacggtgtttatggccgtgcgagcagacatgagaccgtatcctagatgagagtgttggtacagctcgaaatggcggccaccaaagttgaggtcatacttgtggtcaccgggagcaagacgctccggcataccaccagccttgctctgctcgaatgtgggttcgaagacaatctgagtggaaccgccacccagatcaaagacagcggccgtaggagtctcatccgggccaccaatcttgcccagcaggtagttggttgtaatccaagcgtagacaccttcctttgaaccatccatgatctcgacaccacctctctccttggagacaacggggaaggggtaaacagtctctagacggtgtctaacggcttccaagatcttgtcgctctcttcaggacctagaagacgaagtccggccgtggccttgacggcaaccggagagcacgacctgtactcctcggggaccgacttcacagcgacctccataagagggtccagactcagagctgcaccctcggcatcctctccaaaagagctgagaccggaggagcctccctccttctttttcgtttgttcgaacacttcattctcaagttctggggtagggccgcagttgttgaatcggtatacatgaattcgggacccagtgctgccggcgtcaatcatgagagcgtactgaataagaggcttggatgaatcaaacggcttggtgcatactctcgaagtggacgcgtcactgcttgaaggtggttgctctgccaaataatcagtcctgcgaacggcagcgcgagcaaggggaacaccaaccgttggtaagatttgaagtgctcggctgtgaaggggagagccacactaagaccataaagatgaacgcaataattgcccccgtcttcaagtaacgcgatctctgggtctgtgccatgttgacgggttgtttgtcggagaattgactggacttaatagactgcgatatagcaggtccgtcgctgttggagatggagcggtggcgggtggccgaatctatgtagtcggatttgctgttagggatttgattgtcgactccagtcgacattcgagcagttgtcaaattatgagggtgcagtgacaggtggcgtttgttgctggcgcaagaatggtgaaacgattgtatggggttaagaggaataatgaaacaagtaagtaaccattgatcccgatgtcctccaaaaacaccaagccagcctaagaaaaaaagtggatggatgtaaagagggaaagtctcaggagagaaaggagattcagggtttcatggttgtggcgcagatgtggcgttaaatgcatgcatggatgtacatacaacatagtactccgtacataccacggggaacttccagtatttacgcacaataggaatgctaatatacaatcatagcatctttctcttctactaagtccaaagtaattttccttctaaaatcaaagagaagaaaggataagcaagtaacgtaatgattgtacaattcaatcaagttggcggtgcaagctacatagagtgctatatacacgaaagataaaagaacaaagttgaagtatactcagcttcctagagtgtactccgttgggagagtactccgtacagctcgtattgttagcgcgtatagggattatttattgccagtgcgccccgactcttgaattgagggagcaactcacattttccatgtgtgtattaaggcagctagctgttttagactacacgcgggatgccggatatgcttgttaatgtaatgagccatcataacttggccggaagcatctaacctttcaaggttggtatgtaggtagatacctagtccgggggcagtggtttactaatgtttgttgtgtttgcatcctggatagccatactgttcaacttactccctatgtgttgcaaaaacactacatctctcctcacaggcgagcttgccaaccttctacaactcctgctacattttccgctaccagccgacaatatgaatcacacacgcagtttcatatcatccgcccaggccctacgccagatcttcatcgcacccgttcgcacctccagagttggcattcttgcgttcagtcctcttcagaatgcaccccagactcggttttttcaacaatcccattgcctagagcttcgatcataccggccacccgttgaaaagcccccgataaacgaagctatccgtgcgtcgtttgtccaagttgtgaacgacgaaggtgacctcgaccctcccaccagactagaggatgtccttgaaagctttgaccacaccgagttctttcttctccaggtgcaagaaggagacaatgacaacccaccagtttgtaaggtctacaataagaaagaagtgcgagcacacgaaaaggccaaatcaaagtcagctcgcgaatccaaggttatattcaaacaaattgaactgaactgggcaatcgatgcccatgacctgtcgcaccgcctgaaacaactctccacctttttggagaaaggccgcagggtggaaatcctattgaccaccaagaagcgcaagcgcaatcccacagtggatgagatcaaacaggtcatgcagagtgttttggacacaatcagagaggccggtggaactcagaccaaggcaatggaaggtgaaccggggaagcaacttaggattaccgcacagaagaatatctagcggagaggactgcttccatgtatactatatggcattgaactgtacgacaacgtgacatcgctgtttctcatcactgttatactattctttgggtccactcgcacataccttggaagtagcccggagagctaaggccgttggaactctccgtattgagacacatctattcataaaattgatgtttcattatctccatttccaggctaggtattctgcccgcaattcgaggcctatgattggctgatgactaagctgtcctgagatgggtccattcatcccggaacccatcttactagaaaatttggtgttgacctgggcttcttctttcccatccttactccatctcttttaatctttcctttttgttcttgttccatcgttttatttattgaaccaagatgtcgagcatctctcgttcattgaacctcctggcgcgcactagccggtcctccctgctgcgtccgactaccgtcaaccccgtccaccatgtcttcagcaacaaggtgaccggccgtgggttggccactgctttcgagcgtaacaagccccacgttaacattggtatgatcctgtcgttggcgcataatccatctccacgctaaaaggttgttgcttaggtactattggccacgtcgatcacggcaaggtaagctattcgcaacttgttccgacatttccgccatcttcgaacatgagatttaacccgtccgcccatagaccaccctgactgccgctatcaccaagcaccaggcctctaagggtcttgccaacttcctcgactatgcctccattgacaaggcccctgaggagcgcaagcgtggtattaccatctcgactgcccacattgaatttgcgactgaggaccgtcactacgcccatgtcgactgccccggtcacgccgattatattaagaacatgattaccggtgctgccaacatggatggtgccattgtcgtcgttgctgcgtccgatggtcagatgtacgtcccccggtctaaaaacctagtttgatgagtgtgctgacgcaaatcacgcattaggccccagacccgtgagcacttgctgcttgcccgccaggttggtgttcagaagattgttgtgttcgttaacaaggtcgacgctgtcgaggaccctgagatgcttgagctcgtcgagctcgagatgcgtgagctcctctcctcttacggattcgagggtgaggagactcctatcgtcttcggctctgccctctgcgctctggagaatcgccgccccgaaattggtactgagcagattgagaagctcatgcatgccgtcgacacctggatccctacccccgagcgtgatatggataagcctttccttatgtccgttgaggaagtcttctctattcctggccgtggtactgttgtctctggccgtgtcgaacgtggtctcctgaagaaggatactgaggttgaaatcgtcggtgcaaccgactccggcaaccccatcaagaccaaggttacggatattgagaccttcaaaaagtcctgtgacgagtcccgtgctggtgacaactccggtctcctgctccgtggtgtccgtcgtgaggacatccgccgcggcatggtcgttgctgcccctaacagcaccaaggctaacaacaagttcctcgtgtccatgtacgttctgaccgaggccgagggtggtcgccgtactggtttcggtgccaactaccggccccaggtctacatccgtactgctggtaagttcaatttccactgatatgatatcaaatcgataagggatgctaactatgctctagatgaggctggtgatctcagcttccctgatggcgacatggccagacgtgtccaacccggtgacaacgtcgagatgatcctcaagacccaccaccctgttgctgcggagcccggtcagcgtttcaacatccgcgagggaggccgcaccgttgccactggtctgatcacccgtgtcgtcgagtaaatggtccagtaaatgatccgctcacgcccttggtcaggcaggcgaactgtctgacccttgtattatgaaccctttttctttaacatgttgtttgttttggcacctttcattccacagcgcgggaatcatcgatcagcacgagggatccggggtaaaccggagttttcgcttgaatcttgttactgtcttggagacaaatgtagtcggattttctttcatttctccactcccgtgaaaatgtattcagacaaaattcttcctaaactcatatataatttcagtccaagtcttaagtcaatgtgtacaagatatctcgctgcttcacctcttatttctttatataccatgagaggaacaaacttgaaagctagatacatacttgtagacttaatcgaaatactccttacatcaacgccaaatcgcagtcccgtcgataccggttccaattgatgtttcgcccagcgcctgattgcggtatcgtttaagaataatacaaacgttgcgcattttcaaatacgccgtgcgaaatcagacactacaatcgacactatatagagctgagcaggatttggtgctgatatatggtgctgcggaccttcgcagtacttattaatatgtgatgctacgctagttagttagcatacgattcgcccaggtggtacgctatcataatagaaatccatatacggaggatagtatcactgaattctctcctccgataccggtgcgcgggttatagaatacaatagtatatatcgtgctccgcgcatcaagcatttcatatctttatgttgtatgttgtacctacatatgctgtacgtacctggaagaattttagggcgcattacagtgcgtacggagtggagtagggatgttgacacctctaattggaccatctaattccacatagctatattttcctatcattgggccttctatcaacccacagatacgttatcagacagcgttcgcttacgcagttcactttcattggcgctccagggctgtcattgctacctacagtagaagtatgtaacctcacaacccgcaaaaccaatcgggagaaacggagaaccgcatcaaaaggattaatatattgggaagaactccacaaacaataccggagaaacggaaacaaggccaaaacactatatttaaggggaaagccatgggcacatatgtagagggcttttctggaatttttggtattttcttagaagatcgcggaagtgtttcgcattctttaccaccatgaagaatcgagacgatattggtcctatagccagtggtgggacagttgctgtgacgcccttgcaagctcaagatgcaccgacttatctttttacgttgtatgattttatttttacatcaattgaaaggagagaagcctaatgacctacctagcggagattcttacacccagaccgatttcactgtcgatggcacacagccatctatctcaaacccgatggggaacccgatactaggtgagtgctattcacctgaacaagtaggattgaaataatcttagtgccaaatagggactggcacaacgagcggtggtatcaattgggtcggatacttgaccactctatacaatgtctcgccggtactcagctacaacttcgccgtcataggagcgacaatcgacaactctattgtcgatagcaaggttaaggatgtgacatcacaggtccgggacttcgagttagcatatagcaagaagcctacatctgcaccatggtcttcagataatgcggtgtttgggttttggattgggatcaatgagtatcgcgccttaataccccgttgtcagttatgttctaatgcttccaatttgtagcatcggccgcggtcatcaaaacacccaacctaatgtacttgtgccgacattaatggcccagtacaaatgtcttattgaaaaaatatatgcatcgggcggacggaggtttcttttcctcaatgtcccgccgacagatcggagtcctatgatcaccaaacagggaccggaagccgtcaaaacacacgctacgtgggtgagggcttacaatagcggccttcaatcaatgatcagtgactttaagtccaatcataccgatgtacgttttgatctcttgcagtatgttcatataattaacctgatcgtagactactatcgttctttacgatacctggtcctttatgccgaagattctggacgatcctcagacatatggatttccgaatgccacttgtttcaataaggatggcacatcctgcatttggtgggatcattatcacccggggcagaactaccataaactgcaggcagcagatatggttcagtacttgcagcctctcggtgcttggtagactggcagaggcggagcgagatagatagacgtgaatcacaagaggggatcaaaaagcagaccatagaatagttagcagtatggaaaatcccaaacacaagtcgtatagaggttagatatatatgtggtagacggacttaagcggaagaagcgtgtaagtgatgcagctgattggcccgggcaaaaatatcccaccacttcggccgaacttgacggacgaatatctatgagagctaactactcaacgagtgtggacttcttttttgttcttttgtttaagattacgtaggcctggcttgacctcgagtgctgccttgactcttcagggctgttgcgcccctttctcggccgttttgtctctactcccgagattattcctcgcccaaaggatgatgctgtacaacctccaacggtcattaatctgatcaacctctttagcaatatatcgtcggttgacagatgatcttatccttgccttttcactgtatggggtaagatgaaatcctgcacagaccaagaaccgcgaaagcggatgagaaaggggaccagaagttgcacagagtgtatgtgtcaaatgattgataattgatatctcggcgctaatagcgttcaattataggtcgtcgacgcaagatccgatgcacattccaccccaaccgcccagaaatctgtaatgagtgtcggtccagaggcatgaaatgtgttgatcaagaacatgcggttatcacccctccattatccggctaccagcggaactcccaacttggcgaacagccatacagcctacgcgagcgagtcgcgcacctagagaacctcgtggagcggttgaccgaccgacttgaccaacgggactctgacactccgtcttgtgagcaccatgggataaatcaatgttggtatctcctggatacgtgtgtattgatatcgcgtgattgacattaactagcggacggcataaatcacccaaggccactggctgccgagccagacgaactaggcccatccagtgaccagatttgcaatgcaccaatactacaactgttcgacaactatatcgtgagccgccaagaggactcgtcgaataatgataaattcaccggtgttcatgatatgtcgccaaaggccgaagcggtgcgtgccgaactcatgtctctccttcctcccgcagaagatatgaataagataatcaacgcgtcgttccactggtacgtgtggcaagatcatctcccagagctgttcgatcgacatgtcggcagactcgcttttaatgaaaattgtcgcgataatctagtggctcccgccgaagtcgccaaggcactcatgtgcctgtgtatcagtgcgagtcatgctccgtctgaattcgacttcggtactttaaccgtgccttttgagcctcaaaaattctctgatcgatgcattgagatggtggaccgtttaatcgtccgtgatgacaacttcgcggctaccctgcccggtatagaatgtcagatgttgctccacagagttcatttgactgatggccggctccggaaagcttggctagtgattcgtcgggcaatcgagtttgcccatttagctggaatgcatctgtccaccaagattccaaggccaggcgactccttttatgaacggcgcttgaaaatctggtgttccctggcaacatcggatcgatttctgagtttaattcttggcctgccttatggcatcagcgatcaattctttttaccacagatggaacaacgcctcaattcaaacttatcagctcccgaggaatacgtgttgcgcattggcattattgcgggacatatggttgaccgaaaccaagacccttccaagatgactatcgcagcaacattacgactggatcaagagctgcaggattcttgggaatctatgccaagtcactttcaagtcgcagagccttgtgaggatgagaatcgggaacactacattgagagggtcccgttgcaattcatgctcaagctactgcgtgcttttctccatctacccctgatgctgcaatctccccatgagcctcaattccgtccttgccacacgatcgcgattcaatccgcaagagaaggcctcgttttatacaaggtccttcgatctaccaccaagccctatttgtgcaaaatgatcgactttatggctttcacgctatgtcttcttttgataatccacctgcaaggctattccgatgagaatccatatcaaagtaaagagcaagatgaagaagactggggtatggtaaagaaggtgattgagatacttcgtcaggcggcaacagagctaggaggctcagttgctgctgagtctgcgaacatcctcggcgctatccacgacaccaaagatttcaagcacgattggagctgtctctcgagctgcaaaattacagtgccctattttggtactattactgtcggtgcaggaaccaagttttccaagggtcgcccccaaagcaaggagcagacatcagtaggatcaggcacaatagggacggaggcttcttgctcggaacaatgtcccactcagctctatacgccgccgatgtctgaccctgaaggtgcgctatgtaccaacaatgatgccttgaacggtgcttccctcacacccacgatggcgtctggatatccagacgaatcatggcagtcgagaagtgaagtagtggcaaacccatatgtcggcctggaactcaatgcgtttaatggactgttcgacgattttgggcagtacatgtggccaaaccgtaatattgacctcggacttgatcagggctggaatctgaactggtcagatggcgagccaccaccatgaatttagacacccttgtggctttacttaaatgtctgaaatatttatatgctgtaaattagaacatttgacaatatatgtattccgtcgaaagaaatgcgatttctatcatctgattgcatgaccgggaactggatctgttgccagaccctggtcatgtccaaattggccaagtagcattgattccctgcagtgtcaataccattaagattagatctcaatatcctgttaataaaatgtaatagaagagatcagaacaagaaatcgagcctagagaggtctagaaatgacgttgcccgggggttaaagggggttatgtaagattgttttccccagcatcgacctcgggctgattatctcaatgaacccgtgaaaggaccgtgtgatccctaaattattcccatttgcccgtttgattagtctgttgatgtttcccagttgcatggtcctctagatcctagtatatccttgttatttcaacttgctcttgccacaacacctcctccttgcctaacatacacagagcagaagataaacatggccgaacaacgcccctcggggttggaaaggagtccaactgcgccgccggttctctcaaacggccactttgcttcgatcggcgccgaaggtgatacggcctcctatgagcatggcgtgcaggtgattgatgggaataaggagttcaagtacgaccacctacatctatggtttaactaatcatgagccctgaatgctgatcgcatcactatagtcccaacctgtccaaatatttggcccttgagaaggtcacgccagctggtttcaactaccatctcatctccgtgttcggttcgcaatccaccggaaagtccacactgctcaatcaactgttcggtaccgagttctccgtgatgtccgagctggaaagaaggcaaacgaccaagggtatctggctttcgaataacaagaaccagggcgaagctggcgcgacggagcgaatggctgataacatcttggtcatggacgtggaaggaactgacggtcgcgagagaggcgaggatcaggactttgagcgcaagagtgcgctcttcgcgcttgcgacgagtgaggtccttattgtcaacatctgggaacaccaggtggggttgtatcagggagccaacatggggttgttgaagaccgtgtttgaagtcaacctgcaactgttcctaaaggacagacagtatgtatacttctgatggtccctttctctatcgctttaggtgctaacctctctccagcaccacccaccggtccctcctatttttcgtcattcgtgatttcatcggtaccacaccactcaagaacttgcagaagacattattggaagacctctcccgcctctgggacactatatcgaaacctgcgggtttggagaagtcgacaattcacgactactttgatttccaattctatggactgccgcacaagggttatcagcctgaccagtttgtggcggaggcaaaaaagcttggcctgcgtttccgggaaggtcaccgagacccaacgagggatgctcttaagggcgagttctccgaaggaggagtcttcctcccagagtatcatcgccgcatcccggcagacggattcgcacactacgcggaaggaatctgggatcaaatcgtcaacaataaggacttggatttacccacacagcaggagttgcttgcgcaattccgttgtgacgaaattctgcgcgaggtaatgatcggcttcgatgaggcgatcgtcgcatttgaggataagcaggccgagtccgtccgtgctggtgcgccagaggttctgggaggacttggcgttgccatgcgtgctgcgcgtgtcaagacgctaaagagctttgagacggaagccagccgataccacaagggtgtttaccaacggaaaagcgctgagcttcagggcaaggtcgatacccgcctcaaggcacttttccacggccagctgtcggcagctcacaagtctggaatccgtgacttcagtgattctgtcagtgctactgtgaaggatggccaaaagaagggcggcagttacgacttcgcggaaatcgtcaccaaagaggcccagtcttcgttggagaagttcgaggaggttgccaattccacgttggtggatggagcctcttggagcaactacgagcaagagctatctttgtataagaaagaactggctgaggtcagtgccggactgcgccgcgatgaaatgagacgtttggccacccgtgtcgagcgatgggttcaatcccgcctgggtgaatctgtgggccttgagttcaatgccctcgggtctggaagagctggcagtggtgcccccgagaacggggagaagcctgccgagaaggacttttgggatcggatctggaacttgttcgaagagactgttcttgacgctgagcggagattcacggaccgtgcgagcagcttcgatgctagcattgatgaggtcgatgttggtctttggcgactgcgccgtaagtcttggggtgttctccgcgccaagatcgaagaggagatgattgagggcaacttgctcctcaagcttcgggagaacttcgaggacaagttccgctacgacgaagccggagtgccacggatctggcgcccaacagatgacatcgagggcatttacacccgtgctcgcgagtctaccttgacagtgattcctcttctgtctcgtttccggctggaaagaactactgccccacccccgcttgaccgatggattgggcacactccaagcaccgtgacatctgcggatgaggaggatcttgcccccatcgggggggtagatgaacatgagggcaagagtttggaagaagagatgacaattcttagcgatacgaaacgccaagagctcactgtacgattcaagaaggccgcggacggtgtctatgtcgaagccaagcggagtgccattggcggtatgacacaggtccccttgtatttctacggtttgttgctggctctaggctggaacgaaatctgggctggtaagttttcattgatgaatccttcattttcgcagtctgtatactgacgttggtcttcagtcctgcgcaacccggtttattttattctgctatttgcgtgtgctatttgcgtatacatcacctatcagctcaacctgtggggtcccatgctgaagatgaccgaagccgcctcccagcaagctctggaagaaggcaagcgccgcctgcgcgagttcctcgagtcctctgacgctggccgccaggctattgctatgtcggctggggagcgtgctgcgtcttcaggccgcaaggaagagtatgaaatgtcggatatgcaaaagagtggctcgaaggctagtgatgacctggatggcatgtaactaccttgctcttctggcgatcacactgtactttactttctgtagcttctataagcatacaatgtggactttttgactacaatctctttgcacagaacagaagattcgacttttacgactttgactcgattgaacaacttactacatatttcttgcatcgtcgttgtgaatgcatccacgcattacaggggatggtgggggacagaagaagagaagggggggtttatactcgcaggtcaggtgaggacgttgcaccttccagaaggatatcgattacgttattaggcaggtgtacacaggttcagaaggaacgacaagggttctgcattccattgggatacagaagggtgcggcagcgcgtgaaggcatattctgggccttcttgatttgcttctatttcatcggaactcaacttctacatcagctcttcggtgatatcatatcctgctatgttagtagcatctcaatggcgaccttgatataccaaattcaactactgcgggggtcatacccacgtcaagggtccggacttcctccgaggtggggtaggtatatattcacccaacccagcgactaccaaacttagcttgtgcaatgtgaagctttgaagttatttggctaatctccttcgccaattccctttatcctgaaccatgtccggtattcctaatctccctgagacattcgatgatctccccgacaagcgtcggttctggcctgggaccgcagggtcagaagaagaagggctgggaatgctccgccttctgacgcccgagttagtcgctcgcgccgcacaaacacaaatccaaacaggcgagcgggtatgcttaaactggaacatggagaatttgaacccaccaggtagaacaagggcacctaaccgttgaataaaatgagaacctgtaaaactcacaactcgagaaaccaggattcggtcgcaaaccattcgagcaccgtgtcaaatgggtcgctgagggtgtcgctttcgatgacgagtaccacttcaacccacagcagtcctcccagtgggacggcctccggcaccacaatgcgccggccccaacaccagaagacgaagaccgacgccttttctacggcggtacgacggccgaggaaattctaaacgagaactcgtcgcggattggcattgggttttgggcgaagaagggtattgccgggcgcggcgtgctgatcgattacgtctcctacgcggagaggaatggcctcagcgtaaacgcgctgagtcggcaagtaatttcattggacgaggtgcagaagatcgcgcgcgaatgcaacatcatattccaaaagggcgatatctttttcttgcgggtcggcttgcccgggacgtgggagcggatgtcggccgaagagcgggtaacatatagtcagcagggcatgccgcagcatgccggaatcgaacagagtgagcgagtgctgcgctttatatgggataatcattttgcggctgttgcatccgatgctgttagctttgaggttttcccgcctctgaacccggagttcgatttgcatcatcatcttctggctgggtggggtgtgcctattggggagatgtttgatttggatgaattggctgcgacatgcaagcgtttgaagcgttggagtttctttatttcgagtagtccgttgaactgctcccggggagtgtctagtccccctaactgcatggctattttctaggttcttttaagaagctttaatccaaggcaatttgtagattcataacccgatttatcatttggggagtacggagtatcttaatgtcatatccattaccgccacgtgacccagccaacagacacctaatatataaggccaacatttttatatgacccacttttcccttttccccctttgcctcggaagcacacggcttcattccaatattgtttattgtacagatgaatcctcgactcgaattgagggtaatattgaaggtcgaaatcatgtcttgaacatgcaaatcttagcatgtaggcctttttgaaatatgactgatctcgacgctcagccacatcctagaacaggctaacgctaaggtctaaacatcgctagatttatcctcatgattttttttttcctttataggcgaggcatgctgccgccatgtgaaaatttattttcctctctgaagatatgccgcccaccatcaaacgggtggcggctcttctgtcctgcatcctcctagttctagggctctatatttactatcaacctgaaccatcacgaccactcacccacaatggagtacttgacaaatttcctgccaaaaagccaaatcgacagcaattgtttgatggctcttgggattatcagcgcgatagagataatctgatgctcacacaagaccaatgtgaccaggcatttcccgatctatacactgaacttgatcgcgccagggacgatcgcaaatctcgtccgatatccctcaaggaactggatgcaatcccagcccgaaatggatatattcgagctatgatatatgatcagcaggtaaacaacatcatttcgtgggtcatctacttagtgctaagcgtggtctagttgtatgtgatcgacaaggaaggctccatttggtcccgagaaaaagctacactgtctgcgataaatcgagcgatcatttcatcgccagagccgctccccaatattgaattcgctttcaatacagatgactcggtcgatgaattgcccctctggggatacgctcgtcgcgcaaaggacaagtctatatggctgatcccggatttcggatactggtcctggccagagaccaaagctgggtctacacgcgaagtacaagccaaagccgaatgggcggaagaagaagggttgacctggagtaataaaaccgccaagctgctctggcgtggagtgccgatcatgggcccgacaattcgggataagcttcttcaagtgacgaaagacaagtcctgggcggatgtgaagccgcttgtgtggaatgataaggacagtttgaagaatgactacaagactatgccggagcactgcgagtatcaatatgtcgcgcagacagaagggaatacgtactctggtcgtctgaagtatctccaaagttgcaggagtgtggttgtctcgcacgagctggagtggatccagcactactatcatcttatgaaatcgtcaggacccgagcaaaactttgtccaggtgaggcgtgattggtcagatttggagcgacaaatgcagtatcttttgtctcacgacgatgaggccagacgaattgcggataacagcgttcaaattttccgcgagagatatctcagtcctgcggcagaggtgtgctactggcgtcggttgatgcgagagtggaagaaggtcattgatttcgagcctgaattcttcaagatggtggatgggaagaaagaatggagaggcatttccgtggagagcttcttgttgatgggagagctggagtatgatccccgatgaaggcactgaaatatatacatgtgataccccgattcgaagcttaaatttggatcctttcccttattgactaagatacttcgcagttgggatatgctgaacgcgcgagctgggtattattcaactggtttgctggatagcccggtatcagccaagcccacacttatatagaagtaggcgagaattactatactaaaggctacaattaaactatagagattacttggccccctgtaaaactagtgcttcattcttgtgcgagatcaacatttattcgccaagactgttttacgcattccgacccttttccccttcccccccagtgccttcgtgactctgctgcaaaatactaggtaggtagtactcaattaaagtcctacattccaagttcttggaaaatgtgttgttttgagactatgtttacccaaccacaatgatcgtcgcgtgccatcgcttcttgggagcaactacttaaatactatgagacgcaattcctcgtcaggttcctcgaaccaactactttcacaacatcgacactctctttaacgcctttcctagccggagaattactttctttacccaacaatctttactcccgaccaagatgcacttctctaaggtgattccacccctcaatcgttatacttagatgtacacaacttgctaacacaaacagacccttgccaccgcggccacctttgccatgactgtatacgccggcttccctgtcgccagcgttagtttcctctcatgggagaagtgcgacattggccgccccgcactcggcgaggccaagttctccgccgatgtgagcgtcactcctgtgacatgcgacaagacccctgtcaaccgtgactggagcattgacaactattccttccgcgctcgcttggataccaaggacaccgttttctgccacggcgtgaccatctggaacaacgatggctgctctggtgagcctgtgtacttcctgcctttcgaacacagccccttcgccgagggccagtgtctccctgacatcctccagcctggctatgtctctttcaagctggcttgcgagggtttcccctagaggcttaatattcgatttccatgcaatcatgacttccgagattgtcatattggattctatgaagaccttggatcggcgatagatacctacattcattcattgtctgttttctcttatgtgtttcttacttggccctggctcacggataaatctggtattaccgagtacttcctaggctatattttccacgagaccacacttcatagcataatgtttcctaccgaccggcaaattcaacaactaatttctcttccatgaagaacatacaatgcatagataggcaagaagcatcaaatgttggctagtcctgagttttgacgctcatggttctgtacatataacatgaggatatcaaccttattacatggttaggctactgttagcgtggcgactactagtcccgaaattagctcaaccaagccaaggatgatgtttattcaagctggtcaatgacgacgagttcaagtaatctcgcttgacttaccgtgtcgttttgctttgttaagcactcaactatagatcactgaacgcttggcaactgccaaatctgcgtcaagcgaatctagaaagccaacaaaccagactcaataatcatgaagctaaaaagtctggaattctagcacctttcggtagcttattccaggaagatactccaaatttggaacggctaactacgcatagagcttgctagcttcattgccggaccctctgactgaattaatacggcagtaactgtatgacacggttattagcaaattacataacctgtctgtaggatagttcacctgcattccaaatagcgctaataccaaaattgatgggcagtagacttctcggcatggaaacaaggttggagacacttgtctgttctagtcctcctctgaatttgagtctttggcagatacagacaggcaagaagtagagaagaggggtgggctgggaatcagaaattctgtctaatccggcgagggaggcaaggaccgaccacatggacaggtgacacttgcagctgcgctcgttaaagggtctcattgttccttctcctgtcccatattccaactcatatccctattcatacacaaccgtacgactatcatgcctacagacccgaaaattgacaccctgcaccatcaactcttcgaagaggggctgaaggtgtgctgggaggatccttggcgacgagtacatggaccgggctacccacaacgccaacaccttcccccggaaaggggctcattagcgagtggctcccatcttccattcctatctgtacccttactttattaaatattatcttttttatcttcgtcttatatgccttttgccttttcctatctatgggtacttacacgtctgcgggtagttcagccagccatatatgaactcctttccaacccattgctctcgatgccaggttgggctcgtactcggtttcaaccgggtatgagccgcggatcctataattctgctgcccggtaccttagcttagttggtactactactccgtactctatatctatcatatttgaaggatttggagcaagctggagtgctaatacctagcggcgttctgtagatatagtgaagtgaagaaataccctacccataactgctccgtaccggttcgtacatctcgcaaattcaagcaaggagatctggacgcccaagggtggccgggaattcttgtcactgtctgcatgcaaggtgatcatttggcagcctcatatatcattcttcttgtgagattatgcaggggcataggggctagggttactttcggatttaatgcaattcattgaggccttgttgcctgatgttggccttaatactgaccgcttcttggagcgaagcgaagcaatcacaaggtcttcttaaaagttttcgccatggaataactacctccaactcgacaacttttttaccaccttactctatcaagataagctcaatagatttgatttttattagagtgttttgaatttttcaggtcccggtatggcagtcaaaattgaatgtaccttccagagaaaacaaatttgaggtaaatatctgtcgctgaggtgatactattgccgagtctacggggtacgttgtcactattcagctgtcaccactgaagccctattcggcgtgccgtctgccgggtgccgcctgttgtgtaccctctgccgcttgccgtctacctgttacttcccgaagctaaagtcgtaaaaacctcttatattagatgaattaccaattctctattcaatataataaaagtcaagtctattgatatcgagttttgtagggttatcactgaattcaggctcaaaccgcctaagaatcatgcgatgtatggattgtatggcaaaaatagctttatattcatggcgccagatgcgcaggcctccgtaataggtatcttgatttttctgccataccaaactaaggtattaaggcgccattgtatgcattaaatccgaaagtatccctggccctatgcccctgcgtaaaaaattggacgggatctcgaggcgtttcaccatcagagcagtctatttgctgctcatgttgcggattatcggtctggaacgctgcacgtggaaggcaccgtccctcagtgttgcgtctcaatggcgagaccgacgatgccagctgaaggaaaaccttcagttcatagccggatatactgagaggatataaaaagggctgtttattcccgctgcattatatccaacaacattccaacgggccattctgaaaataatcgagtatatgaagagtacaaaaaccccgataccttagttctgctgtctcgccttcgaaagttctacatcatatttcctttaaaacaaatcacaatgccttccgccgttcggccttctgagatgcacacccatgttgccattgtcggtgccggacctcgaggaactagcgttctggagcgtctttgtgcctcggcacccgagtatcttgtcccaggggcacgattgaccgttcatatcgttgatccatcgcccccaggcgcgggtcatgtctggcgtacaaagcagtcggatcaacttctgatgaacacagtcagctcccaggtgaccttgttcactgatgatagtattagctgctcaggcccaattcgtccagggccaagtctctacacctgggctgccgataagatccctggccttggacctgatgattgtggaacccgtgcccagtacggccaatatctcgaatggatcttccaagagactgtgcgacaagcaccacctcaagtgcagattgaggtgcatcctgcttttgctgtccgcttgtatgacacgtcctatggccagcaaacgctcaagctgtcgaatggccgaaccctttctagcctcgcagctgtcattcttgcgcagggtcacgtcccgcttctgctagatattgaacaactgaaaatcaatgcttacgcagagctaaatggccttcatcatatcacgccctcaaacccggcggatgttgatctttctgttattgctcccggagagaacgttttcctgcgtggtcttggtctcaacttcttcgattacatggccttgttaacattgtcccggggtggtagcttctccgaaactcctaacggcttgaaataccacccatcgggcaatgagcctcggatgattgccggatctcgtcgtggcattccataccactcccgtggcgacaacggcaaaggggcatacggccgccacatgcccctcgtcttcaccgaagaagtaatcaacgctttccgcaagcattctgatgctggaaaagccccagacttcctccaggatatttggcctctcgtttccaaagaagtggaaaccgtttattacttgactttgttgaaacgcgataagttggaccagaccgacttccagaagaggttcctagaaactgagccaaagagcccggaggaagcgcaagtccttcgtgactttggcatctcggaagagaagtggtggtcctgggagcgtatccagcgcccacagggagatcaggtcttcaatactaccactgagtggcgtgagtggttgatcgcctaccttcgtgaggatgccaaggaggccgcccttggaaatctgaacggtccactaaaggcagctttggatgtgatgcgcgatctgagaaacgaactccgactcatcgtggatcacaatggtttgaccggcgcttctcatcgagagaatctcgaccgctggtacacacctctgaatgcctatgtgtcaattggacctcctcgccaacgtattgagcaaatgattgcgctcatggatgcgggggttttggaagtccttggtccccgtccacaggtaaaggctcaggacgaggcttggctagtccacccccccgcggggnnnnnnnnnnnnnnnnnnnnnnnnnnnnnnnnnnnnnnnnnnnnnnnnnnnnnnnnnnnnnnnnnnnnnnnnnnnnnnggctgggctagtccactcgcctgaggtaccaggcgagccaatccgtgttaccacattgatcgaagcccgcttgccagagccgaaactccgaaacacgggagatgagcttctttcccatttgttcaaaactggtcaatgccgcgctcacacaattgacggatacgagactggtggtcttgatgtgactcaaagcccataccatctcattgacacccatggccgtgcgcacccaaagcgatttgctgtcggtgttccaactgaaggagtccactgggtgaccgctgctggtgccagaccaggtgtgaactcagtcacactttgtgacactgatgccgttgcccgcgctgctcttagcgcagcagctatcaaggctaagatcactcagaccaagattgatgtgaagacatttccctgtattgaggtgtccaagctccgtgtccatgcttgaagcgagtgtggttatcatgtgcggagaaaaaaagagagggatatattggtgaaagtgacgaggaaagcgaggaatataccggaatggaaagggagaatgtgacatgccataaattttcaaattgatatttttatgtatttgtagttcaaatcaatgtttggtttccagagatagcctgatcttattgcggagcggctattaaatgaatgatcttaatatacaggggtatcccgtagaatgaatgaaacatatgcacaactgaacatataagacaatagtaagacaacagctatcgatatcgaagagatcatgtacgctcaatcgtgaattgcaaagacacctcccatctttgacccccggtgccatacccaccacctagcctgttgcgaatcaagctagatatcttctcccgtagccggacaagattatcctcagatccgttgactcggagcttgaggtttgccatgcacagcccataatggacctgccagaatcgagcgtcgtcaatgccgaacacagcagcgtcggcttcaatatccttgataacatcagaaactccttggccggagtaggacatgagaagcatggagcctagagttttcaccaagcgagttcccaggaagcacattgagaatgcaatggtaccagataagagcttatcgagccaatcatagatccggatcgagaccagaggtagaagcagcagcagagctgaacaagagagggtgagaaagtgggacgggttgctcaagaccgatggaagagattcgatgtacccaaatcgcatagccttaccgattcgagcgtggttcttgagaccaatggctgacacgagcgttgatgagatagctagaattgcagtcacatccacactacccagagaaatccgatcatggtcatgggggtgatgaggctcatgaccagccttctcgaggaaatgctgcaaattatgggagattagatccatccccatgaataaaagaagcacagccatagcgaatccggctaaaacttctgcacgttcaaggccaaacgggtggcggatagttgatctcttccaaacttcaaaattgccaagcacatctaccgcaacacataatagagccccgagtgagtcaaatagaatcagatgtgacagtgctgtcatggccaaggatccatgtgcggtccagagcgtgtatgccgcaatgaacatatggcacacactccaccagaagcgggtcttttgttccttcgacatgctagatcggcattctttcagtgttggcatgggcaaggagttcggaagggctaggggcgcgcgaggaggaggctcgaggaagatctggtgcgagatgctactgtgcttgtacttgtggccacgacgttgtcccatgttctgaaacacgagggaataagttaacaatgccgtcgtcacaggtcatcagcgcaattcaactcaccgatttgatcactgggctcttcgccattacagtagtattgaaattgaatggcccggcggatgtgtcgcccaagccattctcgatcggcgtctctgcatcttcaggcgaggttgctagattgaaagaagactttgtggggctcagagtatttctgatttcggcgtccatgataccctttgtaaaggaagccttaagcggtgatagggaattgcgatcgatgggtatccccgagttgatctgggaggcatgttcgtcgtccgctggtggagtgggggtgcgcggggggagagggagaggaagattcgaagccatcgtgctggctttacgaatataatgcctttatgaattgatgtttcctatatacacatgagtacatatataagttcagttcggggctatcactccccccggacgagctccaatgtttctgccgaccatcacgtgggcggcctaaaagcaccctgaagtctgaattatgagataggttcaagggtcgtttggacaaaaacaggtaataaactagtctcaatgtttattctagctgggctcaagtcttattcgatataagcctatgacctgcagaaacatgcacaagtacggaagactttattttcattggttgtgataccataagcgggcgtggggccttgttccataccgagaggccatttttcggacttcatctcaataacagctatatatacagatatacagaggtataagtagttgctgtctagcatgtgggcttatgggggtttaggcgaatgagtttatcgggggagggcccgggtatgcatggcaagcactatggactaacagacttcgatgtaattgttcgaagaaactagtcatttgaatcggccaggatgaaataggtacaacgagagtaaaatttgatttgtttgaaagaaaagtcgggttcggacctggtatatgaatacagagtcatgaaatcagtttgcttcgcaacgctcgtttacactatttcaatatatcgcttcaactccctataaccgagttagtcttgcgtttataggttgcacagtattttcaacttaccaatcagtcacagcttctctccaaagtcccaattcgtgctgtcttgtggctgtgaaaaagtctacaaactccgagctcaaaatctcccgcgcaatacttcccggagctgagaaacggtccaaagccttgtccaaagtattgggaagaagttctggacggtcctctggcgtgcgtgcagacatcggtgggaccttgatctcaagctttttctgtacacccctccagccggctgcaaggatgacactcagtgcataatggggatgtagatcagccccaggaatgcggacttcgaaacgcgtggcacctggcttgcatactggtggcgtgataagacggattgaggcaatccggtcctcgagtccccagctaatgtgcactggtgcccagtagttctccacgaggcgcttgtatgagttcacagtcggcgcaaacaatggcatgatatctggcagagcttccagaagaccagcaaggaaatgacgtcctgtttcggagaggtatgcgatgtccgaccattgagggttcgcctcgggtgtctctcttgcaaacagattgttcccatccttgtcagaaagggagatgtggatgtgtccggagctgcctggcatgccttgcataggcttagccatgaagcatggtgtaatgccgtggtcaacccctaaggacttggttaagagtctgtcgacttgttagagctagaagcaacatttgcggtatttgcggcactcacttgaataatgccactttgtctgccatttcactaatttcggaaaccttcaaggcctatgtagagtgtcagagtagttcacgggatgacctgaacggatgacatactgcttcatagacaccgggccctccctcagtgtgccatccttcaatgccacaatttatctgcgcactggtattgaaaatatcgtagaagtacttcttgttgacaaccggtcgcgttgaactatagcaaaacatgccagctgtaattggccgcaaggcactaggggggtttttctctaagaaggtagcgaggttggggtgctgggagcctgcactgccgtatccatcttcggaaggagtctggaagttcataaattcgagttcgactgtctgatatcagctttttagactccctcgccaaaatttcccgtgacttacctccagctaaagcatgaagcccttcccccgcaagcctgtcacacagactcctcaacatacttctcccatccgcagaaaccgggcgtgtatcatcaagaaaacgcactaggaagaaagggatattttcttcccaaggtagacggcggaacgagttcagatctggaacagccaggaagtctgcgtaccctgattccgggggcgcgatccgagcatcagttgtccatagcatatcgtgcatgtcccagccgaaaagagctgagctgaagccgaatcccttttcagcaatcccaaggaacttctccttggccataactttgccacgaagcactccatcgctgtcgataccggcgactttgactttgatgtcatcggccagaaggctggggagtgattcgagagtgattatagtgggcgtagtcattttggagaaatccaacaatagcagcaggactaactagccgagttcaacaattggggtgtgaattaaaagagacatttcgccggcccctgtggctttatacaattgcgtgaattgtgggttgttgaagttgcgggtccaacatgtggtcgacattaatgccgcgcatcactgagaccgaaaatatccccgcgcggtgcagatggtagacaatagcgcgtactctctttacacgcaactttggaaaacaatggtcataggtgaagctatgatgggatgtgagatgctccgcggtccgcgctgtggggttccgtagatagcgcgcttatcctgtcgaaatgatacagagcttgagagtccggctttggattaaattgtattaacctcatgtgttcattgttcattctgaatctaaagtggaagtacacattctccagtatgataccctccattcgcattcatatcgccgttctcgtgtgtgacacgcctatccagcctattctcagaaagtatggcgactacttttcaatattccaagaccttttgaggaaagccttgaaagacttggaaatatccgagaagttcaaagatattatggtggaatttagtgaacatcagatggtggacaacaaccgatttcttgatctagaggacgtcgacgccattcttctgactggaagtagtatgttaccattcactttgatatccgaatggggcaactaacactacttggtagaacacgacgcctgggctgatgaccagtggatccgtgacctcaccggcaacgttcgtgagactgttttaaaacacgaaaagccggtgattgggatttgctttgggcatcagattcttgctcgggcgctaggggctcgagttggcagaaacgaagctggatgggagatttctgtcgagaagctcaccctgactgagaccgggaagaaactatttggaaaggatacactggcaagtggagaaacatctggacaagctcggttgagggaaattctgattggatacagagcattcaacaaatgcaccgggatattgtctttgatgttccaatcggttgcgcaaacctggctacaagtccaaaatgtgaagtccagggtctttacttgcccaatcgagtgctgtcggtacaaggacacccggaatacaacgaggctataatgtcgtgcctgctcgaagccagacatgagaatgggatgtttgacgatgaattatataacgatggtttatcccgaatgggtgattcccatgatgggtggttaatagcgaaggtaattgcaagattcatagtagattcgaaggccaaataacaaaacaaaatgatattgttagaagatcgagataaacactaaaagtgcaagaaaaaataagtgagataagctgtcagatatgcaaccgcgccggctccgcgctataaattccacctctcccaccttcgggattccactctttttctcaccagatacacaacctacgctatgtcaaaccagatccgtacagtctgcccctcaacgcacgaggtcatttttgaccagcctggcacttcactcaaagaagctaccaaagttgctgctgcctcaaagcaagcctttgagtcatacagaacaacctctctggaggatagaaagagcattgtgaaaagagcattggatatcattgaggagcgtcgcgatgacctcgccaaagaattgactgcgcaaatgggacgacccatccggtactgtgcatcggagatcaacactatgcgtctgcgcgccgagtacttgatggatattgccgaagagagcctatctgatctccctggtcggccagaagccggcttccgccgaacagtcaagcgtgttcccgtgggaccggtacttattgcgggtgcttggaatgtgagtgagcactgctattgaagtatcctcagattagctcatcaatatgatagtatccttatctgactactgtcaatgcccttgtcccggcacttattgctggtaacagcgttatcctgcgcccttcaccacagaccccgctatttggaaatagactactcgaggtctttactgaggcaggacttccgcctcaggtccttcagatcattcacgttggagatctggatgtcttggatcaggtggcacagattttcgagatccagtctgtctcattcaccggttcaactgcaggtgggattagactcagggaggcaaccgcccatcacatcaagcctgttaacctcgagcttggtggaaatgatcccgcatatgttcgtccagatgtcgacgtgaagcatgttgcagagcaactcgtcgacggagctgttttcaattcaggacagagctgctgttccatagagcgggtatacgtgcatgaaaaaatttacgaggaatttgttcgcgctgtgcaggaggagctgaaatcgtgagcttgactacgttcgaaagggaatatctctctgacattcgaatcaggtataaactcggtgatccacaggatgaaagcacaactacaggccctgtcatctcaacgcaggccatggagaagatcacttcccatgtcaaagacgcgattgctaaaggagccgtcaactctactccccagaacctaagctttgaggtagcaaccaaccctcaaacccaaaaaggtaactttgtctctccggttgttttgaccaatgtcaaccataccatggctacgatgaaggaggagacgttcggtcctgtgatgccaatcatgaaggtctccagtgatgacgaagctattacattgatgaatgacagtgagtatggtctgacggcgagtgtctggacgaaggatatcactcgcggagaggagttgatcgatcgcattgaggccggtacggtgttcattaatcgctgtgactatccaagcccggtaagatattttgacaatttatcgacttttcgatggctcactaatgctaatattgcacattaggaccttgcctggactggttggaagacgtcaggtttgggatgcactcttgggccacggggatacgatggatttgtgaagctgaagagctaccacatcaaggatggctcagcatgagtaggcgggtttgaagatgattaaataatgttgtgatctagaacaattcaagaaatctcaataccgttatttattggatattgtggcctttggccgtcacttgtatgcctcagccatagacggcatagaccctcctacgtaggacaactctcaccctcacacagtagccccgcaacagtttcattcaactattcaactgtccgatccgagcatgtctcctacaatttgaacacaagaattcaccatagccagctcatgaggtttgtaattggtaacccccgggcctgtgagcatccgtgggatgctttatccaaagagacccccactataggtagcgcggtcccggaccgcgctcccttaggcccaagacccaaccactaccggaaaatgcttcatgcacttgaacgcgtgaagatctatctaacagctacccctcatgccccgcatgttgagctcaccgcgccatcgggtggggtagtaggagcgcgatggagctttgaacttgtaccacatttgtgtgaattgagatgactcgaaaaagggaaaaggggggaatatagcgcgttgacccgcgcgggtggtctaattaccatgtggacttgatatcggttggagctgctccggtatggagattgtacaatgtggactggagattggagaattggagataggaaatgctataaatccaggccgttaccaagagccctctgcagtcatttttattcattcttgtcaaccacccaaaccgttccattctccctagctccttcaatcatatcacacacacaaaatcaaaatggttggacgtcttgaaggcaagaatgctatcatcaccggtgcagctgggtatgtacctctatcccactatccaaccgaacaataaaagacagaactaacaaaagcagaggtatcggtctcgaaaccacaatcctcatgctccgcgaaggcgcctccgtcctaatgaccgacattagtgaagcaggcctagacaaagcactttccaaggtgaacagtgtcgtgcccgcctcaacccgcaccggaaaggtcgagactaaagtcgtcgatgtgtcaaatgagtcccaaatcgaagcagcagtcgctcatctcgatgcctggggtggattagatatcatcttcaataatgctgggatcatgcaccccaaggacggagattcggaagagtgtcccgaggatatctgggatcgcacaatgaatatcaatgtgaagggcgtgtggtatggctcgaagcatgctgtacgcgcattccggaggcatggcaagaagcgcgctagcgtgattaatactgctagtatggttgcgctggttggggcagcgacaccgcagttggcgtataccgctagcaagggtgctgtattggcaatgacccgggagctagctattgttcatgcccgcgagggattccgattcaattccctttgtcctgcgcctctcaagtatgtgatatcttggcatttccccgttcaaaccctttgatggaactgacattcagatagcacacctttgttgcaggattggcttggtgacgataaggaaaagcgcttccgtcgtgaggtgcatttccctaccggtcggtttggcgaggcgattgaacaggcccacgctgtgatcttccttgctagtgatgagagcagtttcgtgaatgctactgacttcgtcgtcgatggtggtttgacaaaggcatatgttacgcctgagggtccggcgacggaagcgccgaagaacttggctgcatgaacggatggtgactttgctaggttgtacataatatgagtaacaggatgacgctcaacatcatgcaaatgagatccatatttggttttgctgcattgcccgagaaatattccatggcccggcctcggacgcaggtgattcccacattgcttcgagcagtagaagtgttcggttcatattaccaagaccaaatgtctcggtcatggcattcaatcgtcctcgtaggcaattctgttggtcggggttgagaaggcatgagcccaccacagcgatcggccaacagagcccggagttgatgcgcgcactgggcgacagctcatccaggtatgacatggcttctgtcacgacattttccaccatgcctttatacattccatctctggtgtattggaatccacctaaagaggtgtacagatagacgagtatggcttgttggaaaattagcccagccagacggacctccgtttcgacattgggataaggtgaccagcgtagaatctgggcttggatagatgcaaacatggcaatatcatcagctgttggaattagcgcctgcgtgtcgtccatgatccactgtcggccaagatcgaagatacacgggatcagcagcaatagctccagccagcaaccgcacaagttgcccacgtactgagtctgaagtaattcacgcgaccgttgttcgagatccaagtttaagaagatttgcccgctaaagcgagcatcgattgagatcatgctgacggtcgcagtataggtgtagtattcgatgacgaaatctttcaagtctcgtggaactgccgagtcactctgggcaagcaatttgactaacaacgagttggcggcggataagtggtcaaatattgtcccgttcatatcaccctttgctgtctgtttttgtcagattgttgaacccactacttttgaatcatggatttcctacctcggtaaaacacatcagaagtgccccaactaggagcacgagggggttcgattctttgccgttgataaagtctgttactccacggcggaaatgctggagggcttttgagtagtggctgtgggcaattgtatccgattcatctcgtgaccgaaacgcgcggtgagcggcgctttgagtgattaccagctgcaacagcaaatcactagaaaatgccaggggtacaatctgtaccaggaaggggttgacaggcgtggagccatttgccatgcagtcggctgttgtggccacgtaatgactgagaagctgataagactcagcatcatatccaggcatcatggataggctgcgcggcagcacgtttcctattgagaaagaggcgacaagagaatcactggaaatggcagtcctggtagacgttgacacttgtcgtcgattatggatctcctcatgcagcgttgtgtcttcaaattggtctccggtagtcaccgagtgccctgaactcgaagaaatcgatggcgttcggtgagttgagggactcctaggcatcgccatttcgtgaatttcttcggaaatattcgctcggcactcatctacagtaggtgcttgagtttcgtcctcatggctgggatctctcttgccaggtacatctgggggccactggcagcccaggtcattgcgctgacagccagcacagattggatgtgtctcgtcgcatttcttcttgcgacgcctgcaggtcaaacaacctgttcttactcggacaattcgctgcacacgtcgatctggcggcatctttgattagaggagatcaaaagaaggcaggagattaaaggatctcagcgccaatctaacggttatctctgggtagagataagaaagtgtggggtaagccgagccggccacttctattcccgagcacgtttagagaggtttgtacaaaaatgggtttgatgggcttgatggtttgaatggttttaatggtcttgatggtcttgatgttcttgacaatctttctaatatgaacctctttaactgtatatcgagcttcgttcggcagcaaatgatccatcgccacagtattgcatttatctagaaagccccagacctcagcttccttatgccacaaatcgttatatatgcagcactctagcacggactttcacagaacatttctggaaaactccgagtctgatcctaagttattccccggcaactcaagggtcagccacgaactataaaccagcggtctagactcgttaatataagaaaaatgtaacgtaaatcggactaccgaaaacgatcggaaatcggacatccgaagatacataaacaccggcatatattgtatagatcaatcataatgtctccagcaaatctgcgtgatcccgggatagcagcctgtttgtatcggacataaaaccaacacaagtgtcagccaatgaaaaatatcccggaaccgggagaaccctataccggcttcccaatgtggcatatggtattggcgatcagccatcgcacgtgacttatgtgccgaagacccgacaatcaacacctgaggctgcaaacggagccacgaaataccgcttctccccacatgcacactgccttaatgacaacccaagacgggtcaagccgccggtattcaggaaaatttgtgataaacaaaggggcaaatggggtctggccaggggtcatccgtgtcaagctttgggtaccagccaatcactatgcacaatattccaaactggagagctgtgggttttcttctggcggtgttaaggtccttcctgctttatcaccgttcgcaatggttggaatatgccggctttctgcctgatggttttttattgtggctattgatttgatataaaaacgttccccgctgttgcagtctggtcctttttctctagggaatcaatcagtgtcgcgtgcccatctagttggcttcatatattaaaatttttcagtcctttccccaattattctcgattggttctccgcatgagcatcgataatgtcggaccataaagaatctggctcgactagaccacagtcggcatcaatatccagtaccgattccgagtttcaggcatcaagaacgcagtcacgatctcagagcttggctggttctctacggacgaggctacggtctctgtcaaattcaggaatgacccaggtagatcgagtttattcgggtcgacatctcaatgaccagtcggtataccacagcgatgagttcgatgggtccgacgatgatgagccgtctgtcggaaacgagcatatgcccgatatcattcaggaagtacggaacgggattgtgaacgaacgcgatttggatctagaaagagccgatactgcacagcctgaactggagaaatcaaggacatcaaggtcgaaccggtctcgtcacgacccaaaactggtaggttgttccatgttcctaaatctgcattcgatattaagttgtacaggtacaatgggatggccctgaagaccccgagaacccaaaaaactggagcagcaagaagaaatgggctgctgtcatcaccgtatcactattcaccttcatctcgccggtctcttcgtcaatggttgcaccggcactgccatcactggtagcggacctcaaagtcacagacgaagtagtttcacaacttatgctctcaatcttcgttctagcctacgctgttggcccattattcctcgggccattttcagagatctacggccgaaccatcgttctgcaactcgccaacctcttcttcctagtcttcaacatcgggtgtgcggtctcacgaacgaaagtccaaatgatcgtctgccgattctttgctggactaggaggcagcgccccgctagcagtaagccaagccgcaaaactccgctcaagaaaagcttatatctaaccacatctagatcggcggcggggtcctttcagattgcttccgggctgaagagcgcgggaaggggattgcaatctacagtcttgcaccactcctaggcccagcccttggccctatcgcaggaggcttcatcgccgaaaacacaacctggcgctgggttttctattcaacctcaataaccgacggcctaatccagctaatgggcctcttcttcctacgcgagagctacggtccgaagatcctcctcgaccgcgccgtccgcctgcgcaacgaaacgggcgacgaatcctaccaaacagaagcagagcgccaaaataagaccttacccgaagtcctgcgcagctcgctcatccgtcccttccgcctcctcctcacccagccaatcgtccaagtcctcgccctattcatggcctacatctatggaatcatgtacctcgtcctctcaacatttcccaccctctggacaagcccaaactattacaacgaatcaactggcatcggcggcctgaactacatctctctcggactaggcttctggctcggctcacagatttgcgccccgttaaatgaccgtatctaccgccgtctcaaggcccgcaatggcggtgtcggaaaaccggagttccgcgtcccgctgctcttcgtcggcgccttctttatcccctctggcttgttcatctacggctggactgctcagtaccactgccattggatcgcaccgaacatcggtgctgtactgttcggtactggcaatattattgccttccagtgtatccagacttatatggttgatacctatacacggtttgcggctagtgcgcttgctgctagtgcattcctgcgctcgctagctgggtttgggtttccactctttgcaccgtatatgtatagtgctttgaactatgggtggggaaatagtttgttggcgttcgtggctattgtcatcggggtgccagcgccagtgtttttgtggaagtttggggagacgttgagaaaaaagagtacttatgcggctggctaggtccttctgagtttttttaacattattatgcttagaaggggtttttcaatcggctaactcaatatttaattcctttgctgcgaaagtaagaagctatggcgaacacggctgtttttttggcatgtggccgagattgtcttcatgaatgcctcgggccctataactgatactttatacccctggtttgtttgattcaagacacggaatttatgccgaagcacatgtaagttttccttggtttgactctcctagactttctctagtcggtgctcgatctgcaggggtttccaaggtcctcgttagttacgagttacgacacacaaattggaggttgaatctgaatggaatgccatcgttaattcgaccagctttgcacctaaaactcagtgtagaattatatatacgatattgtcaagccttatttactttccatcttcacataaggagacactaatactatactgtgctgatggtagactgtaagggcaagaggggacatcaaaggtatttagatccgttacaacaatgtttagataaaagaaagattttatggtaaaaagtatgtattcaaatcgaatgaaatgtcgagaaaagagaaagagatcgtagagcagactattcacatactagtctgcccgctttcccgttagacacagggggggtatagagattctatggtcacatgataatatgagatccgaaacagatgattaattcgattcgctccgcgaatctcactcggccgacatcaaccaagggcaactgacgattggagcttttactcctcgtgcttggtatcgccattcttggcctcactgctgctgctcatggcagtctcggccttctcggcctcagtgttgacctggaggtcggaggtatcgagacccagttcgttctggaactgggtaatttgggcgatggtgagcttgggcatctcctgtgcgacccggtaaggccacttgccctcaacgtgggccttggcgaagatgatgtcaacctcctcgagatcacgaccggcggtctcacagtagaagaaccaggcgaaggggatggcgataaagttgataagcgcgaagaagaggtagataccccagtcggactggttggagaacacaggagtgaacatgacgacggcgaagttggtaatccagttcatgcaagtggaagcagaggcggccttggtacgagtacggagggggttgatctccggggggtagatccagggtagaggcagcgtagtaaaggcgaagaagcagatgaagaggaagataccgacaatcgcacccttggcgttctgcgagttcgacctgacgagacaacccatggtgatcatgaagctgagaccctgaccgaggaaaccaatcaagaacaggttgcggcgaccgaccttctcaatcataaagaaggatgggatagtggcaagagcgtagacggtggcgaaaacacctcctagaaccaggggaagcttgccctccatgtgcaagttctgctcgaatagcagggtcgagtagtagatagcggcattgcaaccagtgaattgctggaagaactggccagagcaaccgatcgccatacgctggaagtgctgagtcttaccaccagtgaagaggacacgccagctactagcctcaagactctccatggccttgagatcagccttcatcatgttgaaatcggcaagcacatcgtccgcatcgacagcactatcgttgagctgcgcgagaaccctgagggcctcctcatcgtgaccctgcatgacgaaccaacgaggcgactcgggcagcataagagcaccaccagtgacaagcgcggcgaacagaatctggaaggcgacggggaatcgccactgaacggagctgtcgacataagagagaccgaaatcaatccagtaggcgatgaaggtaccgacggcgatgatagcaccctcgaagcagacgaggaaaccacggttgtgagcgcgcgaacactctgactgccagacggggatagtcgcggtatccatgccgtttccaagaccagagatgacacgtccaataacgaactggcccagtccccagtggggaccgaaggcagcagtagagataactgtaccgatgatcatgaggataccaccggctaccaggagaggagtgcggccaatacgctgaccgtacatcattgtgaagatagcaccaaagaaacaaccaagttcgtaacaggcagtgactgcaccgcgcaggacggcgacgtgttcagagtcaccatggagaggggggaattccttggtgaactggtcaccagagatgataccggacatcaaaccctgatcatatccgaaaagtgagaatccaacgacggatgtgaaggtgatagcaagatggagcttcttgccccgtaagccggaggttgtggtccacatgatcaacgtcctctattagatgagagggaaataccaaagcgacataagaagaaaaaggaagctcagacaccggggggaatgtttctgtaccttatatgcattcagtgcgcatgtccattgggttagtgccaagaagagaaaagttcggagtgacatcggcggcgcttcaacattggataggcaagtcttgcgacccgccgtgggggcccaggaggggctaaggagggggccaagggccaaatgagtggggttgcggggatgcaacaagcaaatctcgcggtctgccaagtgctccgagcggcgtgtgtttaccgttttgggccttgggttatctatctcactacactaactgagcaacgttacatggaatggcgtatattcgttaagatagcaggcttgctcgtcttcttattttctcgtggcttttgtggggggtggatcacaattcccggggggcgtctggaggcgtctggaggtgagcgacgatacttagccggaaagggaatcttacccgaccctccacgacctccgcggccaactccacgacctgcaagtactgggggaataagaaattagagggggggggaaggtgggtcaggggccgaggatttcattgaatggccattcgtcgaccgcaattggcagtccattggtttttctttttcgcacgctcggtgccgattggtgtggcccgaatattacgtattcccatgcttccaacgatctcgtgaaagtttccttttttcttcggaactgcgtcgtgcccgatgccccggccggttacggcgacgggtcagccgtggactgcaataatttcccggggttctgaggggatgccgtcttgagcaatgatcatcgggatcacgagccatattcttctccatattctactccatactctactccatactccgtggtcacatgagaactgtgggatgtagactaacggcttgcggactcaacaacagaacgtcccatctacggggtatgagtatgcccgatgcagcccttcccgaagacaccatcccgaagaagcatcccgagaaccatatcaaagagagtcaaaaaattggggaggaaaagtgggcggacccattcgccaagatgattccgcattaggaagggataaccatgtcaaagacagcggatttcgaaaacttttacaggtcaaccacacttccaagatcaggatatttgcttactccttcttggctcatcaaccaagccttccaagtacatttccaagaaaattccaagaaagcgaagcatttgacaagcatagcttggttatatgcctattctggccatacttcatacgccgtatgggagaaaaaaaaaattattcacctgggcccacacaagatttcgggaaaacactgaaagtcaagcgggcattatcgggcacttcacctccgatttgatatcttcgccagtaaaatctctgctcgtcgggatatgaaaataatggaacctggattggtagacgtgcatgtgagcagggaggtacaagcctatattaattttcctattggaccaataacacaattccccgagtggttgtacatgtaacatgggcgagacaaccctcggtaccttcgcgaatcagaacatgcgctctgtccgcgatgatgccatgttagatttgagtgcaacgtacatatctcttggcacccgttaggcgtcgtcgcttaggagggtccccgacatattgtacgagacgagggggagccgatacttcgcgggagtgcagatcacggcaaggccgttcatagtccaaagcgaaactcctaaaacgtcatagtaaagcgccttctaagtatgtggcgcttcgagggccttggcgtgccccctcaagttcctcgtgggaatcatgggaaacagattgccatgtggccagcaactctccgcaaaacttccttgagatctgagagacctcgggtgttacttggaaatgaatcccactatccctgattggtttgtgtaatgtcgatctccgttgagatctggcagatgtgaagccagattgatcagggtagtttgagctatagcaataatgtctgtaattggattatggtaaaaagaaatcattgaaatacagaggtttgatcgggtcggcattcaactttgggcaatgcgtcaaagagtatttcaatagtagtttcagcactatctgaaaagtatcctgccaactctacatgagggcatcggcggtgtgacatcagtccataaacggtcaacgcgcttggactgcacccgcccatattatatcaaaagcatatcagaaaggagaaaaccagctttgagatagagggtcgtttctacactgttgtactcattttattatcgatctgtctatcttagattctgtcgttcaaaaatcggaggattattagtggagattgtggagatacatatttcctggggtagaggtaaactggggatgcccccatactcatcaacatagtctgtagatcgtacattggaagaaagtcacaacattcggatccacaatgattgtgacaaaatcgaagaactattttaatgtggtagaacaacatagtattcaatcaactttttaaacactagggtaactgcttatgttcacatctgacacggtgacagtgtatcatatatatatatatatatatgtcgattattggttcccagtgataccagactgcttcttaccgtgcttctgtaaattattagcattagaatcatcagagggaagaatgggaaggcttcataccagagtacgcgagtacttgatgcccaggttgtttccactggcctcgtcatacggcacaggactggtgtagtcgcgggtagcgtgaagaccgtggtaggtcttcttcacgaccttagcaataccattaccagcagagcactcgccatcggtgagaggaacgggccacttggcggaataatgcgagtcagacagggggccagggtaagtctggttgaggtaggcactgctgagatccacttcccagttgacgtagccggtcctttcagcgacaatgtccagcaggttggcgccacaatcccagcggccaagcgatggcagaccccagttagcggacagggaggcaatgattgagtagtgtgtgtagaaagtgtcgtcggtggtacccttcaggtgttgggggacagcgcctccaaccaggacgctgaagacccggttggggtgggtgtagttgcctgactcgtcaaaggtgagcaacaccaggctgttcttgctgaagtattcgtttttcaacaggggaggcaggaagctttcgacccagttgccggccacaccgatgttggtatcgtgagcgtcgttggtcatgttcggtgtgatgaacatgtgttggggaaggcggtggtgttccaggtcatcgtagaaagtggtgaaattcttgatttgacgcgggcgcacggcgtcgttggtaaccgagtcatacagaaccagcgggttgtgcttgcgcacgtactggttcgcgccgctgagggggtaccgcatgccctggtagccggcatagggcatgtcctcttgatactcaccccaagcgatatgcctggtatcaaacagatcggcaatggttgagacattggcggggatctgcaggaagtcgtcactgtccatgccaaatgtgtcaccaccggcagaagcacagtagttgggttccgaggggtgagtgacggcaaagtagttggtcaggaggataccctccttagccagcttggccaggttcgcgtctgcagcagcggtttcgtagtcctgcaaaagggtgagcacgtggtcattgctcgttatgcaagggggggacctaccgtgttctcgagccagatgttcacaaatcgatcaaaaaccaagcccctcacgtttgacacaggagagtaaggccgggctgtaagacggtctgcatcgatttctgcctgagtcgggttcacttcagtggtagtcttggccgcagccagggccagggccccgacgaacgcgagaagagtctgcttggtgaacatatctgggatcgctgtgatgagatagacaacaaaggagcagatcggtgggtcgaacacgcgatcttatactccagccagcgtcggaggcatgacattccccccatcggcaaaaatgcgctatgttacacggcactcttaaccgacaccacgttgtgatcgatgcagggctaactggctgtatttccaagcgtttttttctcccgagctgtcaaggcttgaatagaactgacctgaagaaattagagtccgaaatcaagttgatttgattggatgaatggcagatagtggaccgggtacctgcccgccgctggtccctgcgttgcacgttgttactgttcgtgccctcactggctgaccccctacgctcactggcccgccccggtcaggaacagctctgggctgaccatacactcaccttccttgagcaacgtgatcactatatattaatttgtatagtaatttctagattgttaataaaagcttttgccgaggagggacatatgcttacctcttcttggctcagaactacataactcaagtacggagtatgtgtagtattacaacaataatgataatttatacttactgaaggggagattatcatagacaccagcaacactcatgagtaattcttatatttcgtccttgcttggtaaaatgactgatatttaaggtgagctcggtatatagtacaaaaagcacttggttcgaaaaatagacaattcaaagccggttagatatatcatctagatgattcgtggatgccacgggcgaggaattatgccatttggcacttaattttcactggttaatactacctgaccgtatttactacgaagcattcatggatatatatatatatatcaggatgcttatcttctaagttggctatgataaatatgttaccaccatatgaatatactctttagaagggttttggctaacctctgtggtaggaagaatacttctacattaaaaagacaactagaacgagaaggccgtataggcagccgactatttttgtacccgtagctctcgcctgtacgtgcaaagatcgcgtgagtcgggaaggaccttggatttgttttcttcctttgtttctccatgaatataaggttcgaggctatttggtaaccaatgatacgacaaggaagagaataagagctacagtttgtgaacgaactgctctgatttaagttaggcctgagacaaacaggcacataaactttaatccaacctctaactccgtaattatgcgtgtatgccctaaaaattggtgattctggatcttctcattaacccttaacacagcgcaccacggctgtcatgccaatcctaagactatgggcaatttcgatggctctggtgaaggctatgaagccgaagcattgtagaatagctgagcttttgcttagacccacatacttttcatcaaattcaaatatatggtgctttgactttgacttcctttcaactctatccaagtagagctatggtggagttgctatgtgtatggtgatagggagctatatgacactaagagaagattcaccggagtttgttccttcggtttcaaaatacttataatatggaagggaggatagattgttttctcttgcaggtcacaatagtccgtatagcttctttgctgtcttaatctaaacgagtcaccgaggttcgcaaatacttgtagctttaacagcatgtgcgccgcgaatatacagagaaaaaaattcacataaaaaagtaccaatcctttgctcgttattcttgactcaatgactattacattgttatcttgacaggtaaaaaaaaacaacagaaagaaaaaaattaatggcaccatcaattaggagaaagcggcacgcggctcgttctccgccgacattgggccagacttgagccaagaaaaatcccctggtgacatgcggagggtgaaaagaaacgaaataagatgaggacaccagggaataacgtgcacgccgggagtaaatgtttttttacacagaaagaccgctaacaccgttgttgctcaagatttactcaggcttcttgccaaccatgaggtacatgggggtgaagaggtttttctcagcaccttcgaccagacaatcagcagccaaggccagactgtcggcggtcttctgggaacccttggggaagagaccgatggactcgccggcaccgacgaagcggtgggcaaggccacggccccaccaggtcatgcgagcgatggtgaagaagtcccaggccgagcccatgtgcttgaaggaacccgccagcgggtagtaccagggaatagggtcgggacgggcagcgagatcctcgtgatgcttcagttcaaagccagcgttcttcatggcttcgagaccctcggagatacggaccatgttggagataccgtcaccctgctcgataccgagacggatgcgacggtgctcaggatcatcgttgttataatcgtcggtcatgagccactcgtacacagcgaaggtaccacctggcttcaggacacggaagatctcgctgtagacaccgacaagctcgggggcgtgaacagtggcttcaatggcgtagacggcatcaaagctgttgtcggggaagttcatctgcatgaagtcgcccttgacgaaggccatcttgtccgaaagaccctgcttttccgcgtagtgggtagcgcggtcgatctggtagtcgttgttgttcagaccggtgacgtgagcaccagtgaacttgaccatctcgcgagcagggccaccgacaccacagccaacatccagaaccttcatgtcctctgtgataccagcctggagggcaaggtagtgctcgtgacgggcaatggcctggtggaaaggctcaccgtaggcgaaacggcagaaatggaacgaagaaccccatccatactcgtagaagtcggtagccaggttgtagtagctgtaagagaatcattagtatgagtcgcgttgatcaatgggggttttccaaacgtactgtctggtcaaggtagcatattcagccttgcgggcctataacacagaaaaagttagcgataaggaccaattgttttggatgcctactgccatacctcacgggtctcgggtgtctcatcagcggcattctggttgtcccaatgcttgaagtactcatcgacggcggccttctgggcggcggcgtcctttccgcgcatagcagcaagaccaccctgggccttggctgactttccatgcagagccttgttgaaggcagcgtcacgcgccttgtcctcacgttccaatacagagggagccatgttgaaggaatgagtcgcaaagattaaaaggggtagagtaaaaggaggcaaaggcgtcaatttccaagaatttcctcgagaaaaagacaaaaagacaaggtaaaccgagattggaaataccacaagagaagcgaagcaagagagcacaattgaagggaatggatagcgacttggagaagtaggagaaaggggaaataaataagagtcgaatcccaagcaactttttgacaatccaaagtggagagccaatcagggggttcttccgaacgactagaccgagccttagtgtcctccggggggcagattggggagtggccacactctctttccctcgcgggacagcaagttccggcctgtggctgagtcggacgctgtacctcccggtgggaaaaagggtgacctgaggcacataatcacgtgatacactagccacattgtggcacacgccacttctatcaatcttgatactagccttggaagctctcacctctctccactgacccatactgtccgatatgcctcctcaaatcaagcatgatttgaatcgatccggctgggagtcgacagactttccctccgtttgtgagaactgccttcccgaaaatccatacgtgcagatgatcaaggaagatcatggcgcagagtgcaagatcgtaagtcttttttttctgctcccccgaggctagttcataaccacatactaaatatttagtgcacgcgaccatttactattttccgttggaaggccgatcggacctcccgccaaaagcgatccattatctgtctcacatgcgcgcgcctgaagaactgctgtcaatgctgcatgctagatttgtctttcggtcttccccttgccgtccgtgatgctgctctcaaaatggtcgccccaggaccggaaagctccatcaatcgcgagtattacgcgcagaacaacgagaaggaaatcgaagagggacgcggcgctattgaagaatacgaaaagacagacgacaaggctcgtgagcttttgcgacgccttgcaaacagcgaaccgtattaccgcaaacccagacgaatcgaagcacctgccgaggaggagaaagcggaggaaggcacggcgacagatcaaccacgaacaaacagtcggtatggaaatggaccaggtccggttcgcaccagtgaaagccgcgccggaaaccgctttccaggccggggaggacgaggtggtggccgtggtggccgcccattccccagtaccacccaattaccgccatcggctgcagatattcttccccctaaggatcccaacgtcacttccttgtttattacaggcgtggaagacgatctccctgaacatgcgcttcgcacattttttagcgaattcggccagctccggtcgcttatttgctcccaccgctcccattgtgctttcatcaactacgtcaaccgtgcggatgccgaaaccgccgccaaccactgccaaggcaaggccatcattcagggctgccctctacgtgttcgctggggaaagccgaagccactggataatttggaccgtgaagagagaatgcaaaatgcccgcgagggtcgccagaccgtggcatcggttgccaagggtaagcaagcagatcgacaagccattacctctgcaggcgagggtgctagccaggagaaagctcagcctcatgttattgcaccaccgcccggatcgggtgagatccaatatgccagcatgaatggcgattgaacagacttgggcggataccattaaattaaattgagggttcggagcgggcgttaccaaggattgttattctatgcaaatctatgtacttcaatcgaaaataccccgaagacgccaacgataaaagagtcgggtatcttataatacatgtccggtcactgtcgtagcttattttactgtttcatatgccgtcaatttgacatatggtcgtagacttggcttcgactctgaatagactcggagagtgcgctcaaattcaactgagcatgatggcaggaagtagaatcctatcatgacgagcaagccttgtggattttcacattctgatcgccgattttgacagagtcgttatcaccgcgttcaatctggtcgtgaatattgagttctgtggatcaatcgctcgttagtaaacagtttgaatgagtacacaagtaccaaaccacgaaatgcaatcgcgagattaagaaacacctaccccacttagcagcttcatctccctgctctctcgagccctggacgatgttgtggcgcaggatatccgcaacctcaatcccgtgcttaatttgcattccagtgtcgacagcggaccgacggttctcctcaaacttcttgcgaacttcctggcgcgcagcgatgaaaattgggggatcgtctatagcggacgtcagtatgaacagatgcctcagtgacggttgtgttggtcaaacgaactatggaaggccacccgggtagaccggagaagttgccgatagacacccttagcagcagcggcagtggaggtggccatagtgaaaggcggaattgtcacagaagtatagacgtgggtgtttttaggaacaggccgggaagcaggtggcaaactgctgtagatgatccgcacgaacaatgagataggataaagttagagggtggtgctgtagatgcgatgtagaagttgtagttgtctaaagaagaacgcagatcgatcagaccagaaaatttgaatgtacaagtgaacagagaaaggaagcaaggccgggtgccatcaccaatctcaaaactctagaacatccggcccgtgattggctggaggggcggatatttggggcagaaaaaaaaggtatgcaaaaaattccatcgcgggacccgacgccctccacacacaacttggtaccgtcaccaataccattacacaatggctgctgctcaagttgttgacattaccctccctaccttgcctcagggctgggctggtgagaaggatttcaagattgtcggtgctctgtccggtgccaccaagcgcaacgtggagcccgttggcccgcacttcctggctcacgctcgccgagtaagttcttcaaattcactcattcttgtttcgtcagaattaaccacattctagtctcgtcacaaccgtactttctccgaggatgagcgcctccaggcccagaacaatgtcaaaaagaccgagactgaggaggatgatgatatctctgaagatgaggatcctgtcatgcttgcccgtgaggccaaggactggaaggtcagtaatgtaacatttattctggctggtcattttctaactcctagcagggccaggatcactacgccgtcttgggtttgaaaaagtaccgctggcgtgcaacccccgagcagatcaagcgggctcaccgcaagaaggtcctgcgtcaccaccctgacaagaaggccgcccagggtaacagcgatgagaacgacagcttcttcaagtgtatccagaaggctaccgatctgcttctcgaccctactcgtcgtcgccagttcgattccgtcgacgacaacgctgacgttgagccccccactaagaagctcaccggtagcaagttctacaaggcctggggccctgttttcgttgcagagggtcgcttctccaataagcagcctgtgcccacactcggagacgagaacagcactcaggagcatgtcgagactttctacaacttctggtacaatgttgacagctggaggactttcgagtaccttgatgaggatgtgcctgatgatggagagagtcgtgaccagaaacgtcatgtggagaagaagaacgccaatgcccgccgcaagcgcaagaccgaggacaccgttcgtctgcgtgagctcgttgacgagtgtctcgcttccgatgagcgtattaagaagttccgccagcaggctcgtgccggcaaagacgctaagcgtctcgccaaggaggaggagatgcgtcgtctcaaggaggagaaggagaaagccaaggccgccgaggagcagcgcaagaaggacgctgaggaggccgccaaggctgaccgtgagaagaataagaaggctaaagaggccgctaagaacgcttccaagaagaacaagcgtatcctcaagggctccgtcaaggatgtcaactacttcgccgccggtgagcccactcccgctgatatcgacaatgtcctcagcgatgtcgacctcatcatggccaagatcgatgttgatgagcttgccgttctggctgagaagctcaccattgccggcagtgatggcgctgctgtcaagaccgcttggtctggcgaggctaagcgccttgttgatgctggcaagctgaaggccggcgaggccaaggtcttcgtttaaatattcttgtctacccgatagatgaggggtagcctatatacttaggctttcctgatgatgattattcacgccacatagagtagaaaaatggatggtgctcttatctaaatgcagtgtctacctatgtatcactcgtagttcttgtcctcaaatccgcatgacagaacacattggcttcgagactacgctccaactaacttccaaggttactacattcagccaactgcatgtctgaccactcccagccacgtgattggtcatggatcggatagtgcgctttttcatcatttgtttctagggtcatgttctgattgcggggtcacaagcagatagacacgatggatgtctctggcgaaggtcggtttgtttaaaagtgatcccatatgattacaccacgttgactagtgaaggcacttagagcgaccagaactcagtctccggaagatcattcgagttgcccaagacagattacttaaatatggaccctcccaagatatagagcttgaagccgagaatatgcgctatatctccgaaaacacggccatcccgatcccccacgttcacgagacccaaatccatgatggtggcgctaagtctatattaatggactatatcgaaggtcagacgctgcaagatgcctggtccagcatgatcccatcacaaaagatgtccgttgcgcaggaactacgtggatatgtacagcaactccgggggctaaagcgcgaacccctggaacctttcagccataaacatatatacatgcggcgcccagtctaccttgacgagtatctattttcaagattgaggacctctgtcccggatctcctgctcaattgtacgggaaataaatggccggaggataagttggtcttcacgcacggtgatctggcaccgagaaatatcctggttgacgaccatggtcatgtcactgcagttttggactgggaactttcaggatggcaacctgaatggtgtgagactgttagagcgtatactttttgcaacgatattcctggctggaccgcctatctatccgctgttttcccaccgggtgatgcaacggagtatatggctgtggcgtttgctagacatatgaaatgatgagaactggatgcgatatacggatttattcatacatatgaatttattttgctatgaatgcacgcctggcattccatacctcggactgaaaacaagccatattctgggaaaaaagatgcgaataatggctaagaacaggccctaaaatggatacgagactgaattcactagagtatgactgtaatattcctctgtgataaagaagattcgcagggataagttggaattactatgaaaatcgtcgattgtggtgatactacttcggcctgtatgtagtacatcgagaatgagtctagtgatcaaacccttagccccctaggacacatgtcactcctagcttctaatatgttccgagatagtgtactcccaaccccgcgcaaagcatatgttgaccgcggctcaatttcgttgagctccatgattagtgatccaatctgcatgcccaagtgaaagccgaggcggactgacatataatttgcgaacataagtagattccagtctggtttatctttagtgaccacaatgatttttgacccagacactatcgaaattcccaagtcttacgagattcttccattgacggatgtcaatgtctcccaccacccagccggggccctcgaagctacccctgtcattgtggtgacgctaaaccgaccagaaaagaataatctattcactctagagatgatgcatgtgtttgagaagatattttatatgtttgatgttgacgaacgcgtcaaagttgtagtgcttaccggtgctggcaaaatgttctgtgctggtgcggatcttgagcgagggtttagtgaaatgaagaaggagaggaacaaggatcatcgcgataggtaaaccatgaagctccaaccatagctcatatatcaattccgctaataccgatatcaacagcggcggccgattcgctttatccatctaccgctgtcgcaagcctactatagcggccatgcagggctccgctgttgggttgggcatgacgatgtccctgccggctgccatacgcattggctgcgagaaatccaagtatggatttgtcttcccgcgacgaggtctaacgatggaatcaagttcttcattctttctcccgcggttgattggttactccaatgctctttatttaatcacaacgggcggcaccttcccgcctacgtcgccgcattttgggaccttgttccaggagacataccctgatccaaatcaggtagttgcgcgtgcgttggagcttgctacagaagttgcagagaacattagccccatggcatcatatctttcgcaggaactcatgtggcgtagcccagggagtgccgaggagactcacctagttgattcagcggtgttgtatcatatgtttagtgggaggtatgctctctccgtctcgtttcatttagccttcttgggaatatttgcattataagaagcaataataaccgtgttatagggactcaaaggaaggcatcaaagcattcttcgagaaacgaaaaccagttttcaatgcaactcttgaggttgatgcaccgcccagctttccttggtggtccaatgttgatatcgggagacgtccgaaggcaagtaagatgagtaaggcaaaattgtaggcaagtgccactgccttcaaccagcccagaatgtgcacatttagaacgggggacgagaaatgtgattctgtggcacaaatgtgttctgagaaagcaaccttgtaagcgggtccgggatgtggcggagcatccctgagataaagttgaaacggaatctgacagccgctcattacggtctccataatttccaagtttccagctccatccagctgtaggtatctagctccactttcttgtaactcaaccttatctcatactttgagctctacaaaagttgactagtttgtagatgttgatcgctcaagaccacatgagacgaatgttgctatcactacagtatcggcacgagcgcttggtgtataaatagtataaataggcaatctaatttgatgttgaagtatctagatgatgaattgctaattatttacgaactctgccatggccttctttcggtcacttgagatgcggatgcggtcctaaacacagaagtcgacgatggcattggatgtagggacaccggttcctgcagattgccatttcgctgctcggagcgctctttaatccaaggccggaggttgaaaataccgccgcagatgaatatgcccacccaaagggtcaattcagttccataaataattatcccaagagcagaaatagtcgatccaaacactgcttgcatattagccgctgaccatctctacctaacgatgaagttgacctacagacagagaggagcgaaaacaagtccccagcagcgtcaataccgacaaaaatgaagctgattcctcggacagtccggtggacatagatatcccagtaatgtctcagtacacctgctgcaagtaggcacgcactcaaaactgccatcaagatgagaggccattctaatccgcgccttttcgcagcttgcaaggcaaatatgagtcctgcttcaatgccaccgaacagcagcagaagcgaagtgactgcgacacagcatttcatgattcggtatttctgagtttatatgagtattatgaggataatgttgaatataaagcaaagtgtttacctttccatagtagagacactgcgcccaagtaatcaggctgagtgtcattaggatttgaggctgaatcctcagggcaatgttgaattcttccacaatgttgtacaccccgaggggaacccctgcggtggcccataagagcatcattgacccttgtaggccttcagtgtcatgtctcctgtaattgatgactatttgaggaatgagctgtataatgtgatcagtgcgggctcaaaagtaattggcacacagcaaccgcatacttggacagaccagcatacctaaagaatagttagtccgctctaccaatcgggaaaatcgggaaatagaacccactgcacccagggtaccgagaacattctctgcaactcgattgtccatttataagaggcttcgtcgctagagcggcggacacacagactgagaacgagatctgataacggggctcctaagtttgcagggtttgcactattatgcctgaggcaacaacttggcgatgacgcacttctcccgaagtcggcagccgcagcgcttgctaactaggcgtgcatcagcgaaccctggacgatccttacctatagatgtcacacgtgaaggtgggctatttcttgaactgtctatgaaagtggatcaaagtggttcgagtgatcattgactgacaatatactatcgtgtttcctttgtcaatattaatacagacaggttatgtagctagtgttctgtgaatatgacccatctcatatctcatagccaaattctgtaatgttccggagtattttagcgacatgtgtgatcgagaaaaggtacacgcgataactcagggtaaaaaagcacgctccatttaagaaccccctatctacggagtactccgtactccgaacttgatttgataaaagggctgtgcgtgactagaccctgaaagcattcaaagtccagggatcgatggcgatcggaattcaagtccggtcactaatagggaagagtcaaccaaaagatgggttagagaatttacctttgaagtaaataactgtacaactatgttggccagggtggaagcatttggctacaagttacctagtagtttagatgtatgacaaccttgaaagaaaccctaagatgagatcaaacaacgtagaaccatggacatgaagatatcaagattccagggtttctctgccgatcggataagaaatttcttttcttcccaagtgatttaccttgttttttttttccctgtcggctgggaggaccgcatggttgccacctgtgccacctttttttggaaatccagccaccatatttatatcaaggtgtagtcgatataaatagaacgagtctcacgaacatagggagtacattataggaactggtggtgatttagggacgagtacgtatgcatctgcgtaagagggggtcccagcccctcccacttacctgaataggactaaatgatcatcgactggggatgatatcatcaggaatgaaaacccgttgtcggggaggttccacattagtacggagcacggggacggaggatgaattcctgataggagatctatattatatgcatgcatggctgggttcgaccggagtcaagaagtatacatgtggatgcccggacgtaattgatgcttggcaccttgaaacatattctttttctacttcgtacttgcggagtataggtaataaaggaaattcctaatcttaaattcggtgggtccatcataaattgtggactttcccctgtcagtctaaaaagacccttaagaaaccagccctcctttctccttgcgctttttcaatcgtctaccaaacacgccttctacagtcgtcttcaaggcaccatggtctctactcttcgcctctgcctcttggccgtgactctacttttcaacttctcctccgcattccccctcatcagccgcgacgtccaatggtccttcacccttttcccgtcagcctcatgcaacggaactgtcggtgatcctcacgtcggatctggcagcacaggctgtcgcgccgatctctacagcgttgcctctgcctacattctgaactctctcgccgagggctgccgcatcgagttgttcgataacaccatgtgtgaccagaacgaactctccgacatcgccagccaagccaatgccacccaaacttgccgcatagctggaacgagacgccactacggttcatatcaggtcacctgcgcctgaacatcttcaaacctcttttcgaatgtcgctgtttgaaacagtgaagggtctctggcgggctcctagatcctatgcgcaatttttttgaaagtctgaaagatcgattgggatccctcggtgggaaagtataatatgtatagactttttaatgatacccttagattaaatgaaatgagtttacgatcgtcgatataagttgcactcttttcctgctatttactcgtcgatgtccacaactgccggtctgcgtgttctgttatctgtcgtgtcgggcggcttctgtcaataatgcaccatggagattataaaaatagagaatttgagctgtccgagatctgctcactgtctcactcccttcatagcagcgaacatcatacgtcggcctgcaagccaggatcagcttgatgaaatatgaggacgcgcaatggcgggtaacctgatacactagggatcattttccttgcaccgtttaaccatgaaacattaaaccactattcattggaaacactgttctcaaaacacgtcatataacggtcttgacttccaactccatggttgatagattgacggatatatattctcctacgccaataccgcatttacggatatacatattcctgcgccacttttctcgagcgtggcgaggtttataccccggaagacaaacgtgcagactcgtatgcgtggctctcattcgctagaaattatcagatcttctcggtcttcttcggagttaaggcatgggctttccagaaatggataaactccgagggatatacgccgcaagcggatggacatttttggacctttattaaggactattcgcgcttctttttttcatagtcgcatattccctacaatctgtttgattatgacagtagtaaaaactgagttggaaagcgacaccagcccacctgcggctgtatcattctttgatccatctctcaatgagattcgaaagcgggtattctaccaatgggctcgcacttgtaagtaaagtctagaatacggcaactcacggaatgcaagagaaattaacggaaaacaacagtattgattctgtgcgtcttcgtgtatgccgtgctatctctcttctggggagtccagtacggcactgaggacaagttcccagtgctgaaggtatgggttgtcgatttcgacggccaagttgatccataccgctccaatgataccatcgttggtccagcagttacggatgctgccaagagaatcctgcagtctgacagcctccacctcggctacactatcaaatcccccgccgacttcaactatgaccccttggccgtacgccagggcatctatgacgaacatgcctatgccgccgtgatcatcaagcctaacgcaacaacgttgctccgggatgcagtcaccaatgacaatacaacctacgatccgactggcgccatcgagacagtaatcatctccgcgcgcgatgaaacaacctactacacctatatcatgcccgacctagtcatcctacagggcatggtgctagcagagttcggccctcaatgggtccaatctctcacttcatctgtcagcaacctgtcatctgtgcccccgcaggtgatcaacccggccattgggttcacgtccatcgatctacgtccttttgccccggctgtcgctacgcctgccgtcaccgtcggtttgatctatctgatcatcattgccttctttaacttcccctttatgatacctattcatgctcagttcatgaaaccagatggccatccaccgttgaaggtgccacattggctcctttggcgccttttctcgagcctggtggcttacttctttctttcgctgtgctactcactggtgtctctgactttcaagatcccattcagcaatgactctgcgcctgatgttctatccgcgaacaatcccaatggctatggacgtggctcatttgttgtgttttggatgctgaactgggttggcatggctgccttggggctcccctgtgagaacatggccatgatcctcggcttcccatggagtgctttgttccttatcttttgggttattacgaatgttgcgactgggttctatgccattgatttggctccgaggttctatagatgggggtatgcatggccgttacatcgaagtaagtttccccctcatcgtgatcgatgctctgttgctaatgatcatctagttgtcgaggctctacgaaccatccttttcgatgttcattcgcgcattggattggactttgctattttgttcatttggattgcagtatccttggtcttttatcctgtcgcgaccttcatcatgcggtggaagatgctgcgagggatataaaatagggctaaaatatgaagttagcaggcagtaaatagacagtgaataggttgggacagtctacggtagccactggccgctagtgcgctcaggttgtgcctgcagtacatatagtatagtttgtaatatcaggtatcttataagattcaatacttccacctaattacatgtattatgaagttatgactaccgagaaatgcgaaagtgatatcttcaaagacagcgatctagccgcagagggagcttcttggctcaatcattgaagcctgctgagtcgattgaggtctcaactacaagtttcgttgaagaaaggtcttgttttattcataaattcagtaatcctcgccttgtatatcaatagccaatggctacctgttcgctgtagcttcctctctggttttagcttaatgtatgtaaattccaggtctgtctggctattacgatatgttgttaattttccatatcactccttaatttcagttaggtcacgatccatttcaatcaatcaatgttgtttgcttccctgacgttgccacgacaaacacacccatcccaccttggcagtcctcgcaaaccttccaacctctactcattgcttacttctacctattgataattcagcatggcgcgtatggtcacaaccccgttccctggagaccattctacgaccacaaagccaaaagacgccgttgaccagaaacgggccgcgagcccaagtactagccaggacgtgctcaaccctaccatatctccaggacaatcgactgatgtagcaatcgaagaattcgaaattacctctgcactgaagctcatagccgtctcagtggctcagcagcgcttcctcgccgctaaatccctcgtccttcacccgaccaccctaaccctggtagccgcgagtttcgcatacagtgtcggtgtcatttatcatcacccatcttgctggccctacattgttgttttctgcaccaccgcggtattggccactctaggtatcgtcacacgcttgcttgagggatacaacgatgaggctgagaaggttggaacactgaactggctgtacgggcacgatcctagcagcgataacactactcaggaagatcctgccttcaactcggatagtgggatcacctttgtacttgtttatcgattcgggcgctacattgtcggcgcgcttgtcatgagcatcacctacaacggcatccaaccccatccgaaagccaacgcaataactctcccaataggagaaaactacgatgcctgtgtacgtgcctggacagtccaaaaaggcttccggggatacgggattggcactgcgctcctcaacgaagctattaggatctgctataagcatgagtggaaaggactccggttcgcgacttcccacgccaactcccttcgcgtctttcactccctctttcatagtgacatggaccaggcgtccgctatatggagctcgtatctgcgcaagcgggtcgaggcttatcgccaatcctgtgctgtttctgagactagagttcttgatgcgtctctacatgcgagtgagagccagagcacgctgagtgatacacggatgcggtttatttgtaccgaggcggagaagctcaaccggatgtacttccatgtacgccttggacaggtagttgatgctcaaactcggtggaagaaaatcttgtaatcggtcacgcttcattgttggcttgctgtttctggatgtggtgtcggtggagttcaggagtattgatgttaaggttccccttctgcaatttttatctatctatatggatgattgttgcaccaggaactctcatagtcttatgaagaatcttggaagggttgttaccacgtctggctgctttgactacagtggtagtgttttgtattggtttcattgtccaagcctgtaggaagaattaggtttcatcttcggagccaatttgtggcggtgactaactagtcctagtgtttgtagtactaattactagctaactagttactcaagcagtttctcaagtggttgcttgagtagttactaaagtaattgacgataaagcagttaataatgatatgacaaaaggcatttaattttattagtggtttacatacaaattgtaggtacctactgccatactatcatatggcaggaaataagcctaattgtgaacgcggtactgaaattacaggcagggggagaataagccagtaagaggggggctttgtgtagcattaaaagttggaatcagtcgtttcgctctgcaacgactatctggaggccttaggctgtcgagatcactagtatattttccttcacgctaaattagcggtcccatttcgacattcgctcagctgacggccgccaaggacttgctcgagtacttgggagcataggcgcttgaggcatacagcaagttatttgcctcagccaccgagaggaagcaaaccctgcaaacctctcgggagcacagcggggaggaaaaagagctcgtgacggcgtattgaggagctaaacctcataagtcaagaataaccagaaaaggtaattcacagatgcgccgtttacagctacaatatgagcaccagggggattgaggccagaaatggctgcctttccacccgtaattttggacgtccagccgccccatgaccgccataacgtgtaacaccactattctgtacctacccagcacttttagtcaccctccggtcctgatgttgaagtatgctggctatttgagcctggaaatgtaaagaatgtaatgcagaatatctgatatcgtccggttcacgaagtaagctagggaggcaagatttcatggcaaaggagtgagtccaacgagattgagacccgctttggttatgatctctcggagggacgcaatgtcaaattcaagccgatcactgccctgggagcttgaggcaattgcgccgttaaaaatgtcgtctttggtgagataaatgggcagttcaaacgccccatgaaccgggaaaattcggttgctcgcaatcatgcatgcactgcctgtagaatttcgcccccagagttcgattgttccagcaacaccttgtctgcgctggaaaaatttcacaagaagaaccttacacacacccactccttccatcaaagtttcgcatcatcaacgaggcttcgatatgtctgattgaagccaacctcaataattatccttggttcatgcaagtaaggaagtctgaagcaagagatgaaggtatcgggttctttttgatcaccggtgtatggagggttgctagcagtaactcgcgggcttgctgtcaccataacattgagatgttcatcaggcataagttgaccgttgatattccaacgggtcagctgttggacaaaccacgcatgcggggctgaatcggtataatttggcattttcagtgttataactttcctctgggagaataatccttttcgaacacgggggaactttgcgtcgagaagttttaagatcaattgaaatttcatgatccaccgaggtaaggacaacaaacgagtagagagactggtcgaagaatccactgccttggattatcgccaatgcctcgtcggcagatttgattttgtcaagggagatttctttgtcaagggcgtagtcttcactgccagatgactgttcggaaatctcgctattggctggcgtggaatcgattggtgaagacatgatgtgcaaaagaaaggagggtgcttgaagatggaaagtgcaagtatggaagtcgcgaagtgaagtacaattgggacacgtgatcaagggaagcactgagattctattgggtagtcgcacggagatgtactctgtagtgtacagtaatataacccttgatctcttccctccttgcttgtatgcaaatttacgtatgcatagtacttatcacatgcacttgatcgcatatattctgtaaaacaacaaaaatacataagagagggctgaaatcaaaggtttcagcccgatactaagtatagaaatcgggccaagtcacattccaagggaaggcgctcaatgtctcagatagattgacccatcttacctctttgttttgcatttgctttctcgtcagactattcaaaccctctttcgaattcaccaaatttcacggttcaaaatgtctacgacttcctccactacctcgtccgtgagcacaaccagtactgcctgcggtggcagcgtctggcaaatcccaacaacagactcagcttgtgcggccgtcatcagcggaaatatgaccgatgtgatggatgaatgctgcaaggacgcgaaggtctccaagtacgacaacgactgcggcatctactgcctcgcgcaaggccaaaatgtcgacaagcttcagtcttgcctcactagcaagagtggcaactatcacgatgtcttttgcaacgccgctctcaatgcgaccgctacagccacagcgacgggctcaaagtccacttcctcaggcaccggtagtagcacgcactcgtctgctgcctcgacttccacaaatgccgctatttccaaccagcctatctccaagtccggtgttggaatgattgcgctccttttcggctctgctttgatggctgttatttcttaacttggcggatgatttgatgtttcgtttggggattcaatgcctgtcccgataaaatacaatgtttctttttctagcgaacaagcgaccgtgttttcttactcgcatctaatacgaagtatgatttgagatgcataatggaatttgcgcactgcaacgatcaggatatattgagaaacctcatgacgtcatcgggttgcactgaatcagcatctgtttatcctgcccctccactgaagatcagaatatcactactccgtagatacaactgtgttcgaaaatgtcatcaatcgcaaagactgtcatcgcgacaggcacctcgtccggcttggtaagaattatatgcccttggaatattcaggaatattcaggatcctaacatcggtcatagggatttgaaacaatcaagcagttactccagcagacacagccgtacagcttcattctaggcgttcgtgacacagaaaagacacgagtcgcgtacgatgatctgaaattcgacacttcaaagcacagcgtctctatcttgcccctggatcttctgaatcttaagagtgtgcagagctttgccaaacaagcactctctgaattgggcaaaaggccgttgaactatcttttccttattgcggggttccttgccagcgctgaagggccggggcctcatggctcacaatggtgcgaatcatacgtggtaaaccatctaggtatgtcaaaacgactcatcggctactaaaggagtctaggaggctagagctaatcattcatctatcgcaacccagcccagcattacctgacacacgaatttgctgagaccctgtctgcctcgcgatcacgtatcgtcattgtgtcttcgggtgcaattcgtaatgtgagaggaggcgatccaggtgagtttagttccattctcccagttgtgtcgctgtccgaagcaaagttgttcacaaggctgacttcatattagccactcttgaggttgacctaaaagcaaactccggtgcaaacgccagagtagtgtatagtgcatcgaaattcactcagcttctgggtgcacactactggcgtcgtagcctcccaaattgcacagtcgtggctgtctcgccaggtctcatccctaacaccaagcttgcccagcattcgagcttaggattgtccatggatatgcccgatgccaagaccgtgccagagggtaaggatctttgcatttggatttttgatttgaagacgatatctaacaattaataggtgcccagaatatcctccgcgcggtcacggtcgagaatcttcccgctgacccggaacagattttcttgactagctggggtgaatggtggcccaaggatgtctatgcgttgagtcttgatcctgcgctgcaagacaagtggtgtttgagcaaggaggatatcgagaagtccgagcctgtgttcaaggaataaggagcatagtatgcacattttacttcaacgggtctgcaaatagtatatctcacatggagtctgttttgcaaagatactgttccaagagcaatgctattcactcactggctcgcgaatcggagaaaatacgtagacatgaatgagtcgaatttatccctcgtgtagcagaaaagtcttaaagtgggaagtttccttgcgtacatctcaagccaaggcaagtaataaacaacagaaagtactacaaaaaggacatacatattgcacaagcgccgacaaatcgagccagccacaagatcattatatttgcaaatatagaacagcatctatgtgtatatagtatgcgtaccggaatttcccgaccggtcgaaatcaatcataatctaaaatccagtacattacatcaacaagaaaactcgaacctactcagcgttcgcaagcttgcgcatggtagcaaagttgggcgacccgagaccagaaacagggtcccaacccttagtagcgttccagctagcacctgggatcgacggaccaccgttattggcaccaccgaagcggctcttgccatcgcaacccgtgctgccgccatcgacaatgtcctttaggccggcgcgccctgtcgagtacagccaaggattaaggaagcccattggtggtttgttgactttgaggcgagcgtcgttgaggagggcgacgactccggcgaaggcaggtgccgagcaggaggtgccgtcgacgctggtcaacgagcccttatcgtatatagcgtaattgcgaccttgggctgtgacatcggggaaggcacgacccttagggttgaagaggccagaccagcggttacccaggatctcgaggtactcactcacggcctcctcttgccatttcgggcgagcccagagatcggaaaagccgccggacgagaagtacacggcctgttcgggcgcggtatgggttgtcgcgccgactgatgtcacccacgggcaggcggcggggaactggggtgggaagcgggtcgcgttcctgccgtcgttcgtcaggcacgcggacccaacgccggagtcgccagatgagaaaatgacggatacaccacggctaccgagctgcgagtacaagttgcaaacactgcgggcgtacttctcgggaatgctctacaggttgatattagagaccgacaaaatcacgaacaaagggggggtgggtgtcatacctgctcgtcctcaccataggaggtagaaatcacctggggaaggtcctttttgtccagcttgagcacgttctggaggaattcaaggtatggctcgttgttgttatcattgggatcaggctggtcgagatcgggaacaagttcaccacggccgccaacgctaaattcggtgacgggaacaggagagctgactccaacaatgtactgcaagtccaggttcgcctcgctgctgctaccgctggaactttgatcattaagaccgccgttgtacctggtgacggagaagttctggcccttggcagagggcgcgatatttttctcaaatagtgccagatcggagtatcgtgcatactcctctaggtagctggcaaacccgaccttgttcccattggtatcattggcctggtaatcaccgatattatatatatccttgagacactgaggagtgatgatactgttgcaatccggctgagcggacacggcgtttgagcggaaagcctcgtcggattccttgacctggccgtgtaatatgccccgatgggcgcgcagctggccgaaacgggtggttggctggatcatgttgatgtgtggcaccagagccttcgggactgagtacttgagtgtgcgaagacgctcaatgtgcctgacattactgacgtagaactggaaattggctgccagcagctcatttgccgtctccacggtggtgtagaaggtcatccaatctgcatcctgttcgatcctggtaatacccgcgccttcgagccagtcacggattgactccgcggactccgcactgggctgtagcatccgcttcatttcttcgtgggtggtgaagtggtgcccgtagctagggtgatcgggggttgacatctccatcacagcctcttcgaagccggcagtatccccctgtgtcagagcgatctgtaacttcaagggctgatcagcacgcggcctgcgagaatatctccatcctaaggtgggtcagtgaatcaattccgtcggtttcgtttcgaacgcaagttgctcaccttgaggaacagcagacaaactctcaaatacatcggctgcagcagaggacgcgagaagcgacaagaccgcgagcgacaatgctccacgactaaatagggatgcaatcatgataaaaaaacgagcgatatgaggacaccctatcagtctaggcctctgcgcagcgaatacagggagtataaatagtctaacagaagactatcaaatacaaaagaggggtaaagaccgtaaattggtgtttattatggttgcattggcggggggaatgatggggcgacaaagaatgtgtgttgaagaagtccaggataaaccaggacaagacaataatattgacaatggagttctttgatcgaagtttcacgtcattcgcttggcacaacagtggaccctttgtggatgcccgcctggtgagactattctaaatcaataatcgctagtagcggtggctgggattgcatcttccggatctggctccatactcgcatcgtcgcgatatcctttcccaaccggagagcgaatgttactgatggaatcggtatagaagcaagccctctatcccattgtgatattgggcctccgtcgggggcgcgtttatgatcggcaggggttgacccactgtgtttgaaggaagcaatgcgaggggcgtcagggggcttgtattgccgggtggctggatgacttggccctaaaacgagatcagctctgattctaatttacatgaagcccacagttcatctgcgatcagatctgatcgatgggaatccgctagaggatatgttcatgatcaaaatcattcttctcctgccaaatttgggtcgtcatgcaccgttgcaccaggcaattaggctatctcatcaaatttgaagataagcttggagggataggtgctaggtttctgtggcgttgtgatgtgctgtcgcaacccgaatgaccatcggttttatttgcattgctgtgcgtcggggtgcgtcgggagtgcgtcggaggctggggtcacaaaattccaatttgctagtgccataatttaggcactggagacagatgtggctggtgatctctagttatctcccttcattattcgacgtgacatctcagtctcgggtaaaaatggctgggcaagaatgcgaggtgagatgagtacagagtacttgcgacgcttgctttcgtgacacctatcaagggacgagatgatagttcccgttggccccggactgttagcgattctatgtgttgtccgagttatattaaaatgttgacttcgtcgcagacaaggttctctggggttgcaacagtctccatcgtccgtcggtactccgtaccccgtgactttccgccaagttatgtgttttttttctttcggttctctttttttaaagagatgatgatactacatacggagtatatattaaagccattgacttcgattatctctagattttcattataggaaaacgcgacaacctggttacaagtatacaaatccaaccggattatggtgatgcatatgtataaatatgtacatgcctgtcggtccaaaaaaaagtatagcttctatacacaaaagatgaaagcccatggtattatttataatcaacgatgactggagcttgaacaacaggaacagagccatcaacacccacctcattcaattccagatggtgggcgtagaccatcgaggcgatggcatcttcagtctgaagatatgttcggttgcctcggatgaaccagaatgcaacagcgatgaccagcataacgccaaacacggcaatggcaaagttcatatcactgggcgccgggttggggctgccagggaacaggaagaaaatggtagtgatgatacagtagaagatgctgacccaattcaaccacggcccaatgcgaccgagcttgaatggacccgggggcaatttatcacggccgacgacgagcaaggcaagaatcggcatggcgtaggagacagtcagggcaatagtgctgacactgagaatcgcctcgagcacagtgttggcgaataggtataggatgccgacaataccgatgacaatgctctgaccccagagagcgcgagcagggacttgccatacagggtcgacgtggctgaagtagttgctgaaaggcacaccgccgtcgcgggaaaagccccaggtcaaacgggaggcagtggtcaggatactgatgccctggcctagaccattgaagatgaacagtgcaaggagtacagcggctcctttcaatccaacagtctcgacaataagctccatgaaggggaggtcggcgttaacgacattgtctacattctggatgcagaacagacagaccaccatgaagatgaatccagtcacggcaccgaacaaaacggccatccagatgactcgaggagcattcttccgaggcgcagggatttcctccaccatgtgaataaccgaatcgaacgcggtcaacccgtacgcggcctgtaccaagccggtgaaccaaaccacaccgtcgccccagccagtctcattcttccaagcaccgaacacgaaagaagccggctggaatgacagattactcttggttccgaccgagataagtagcacaagagagagaacgatgaacaggccgaagaaccagactccaacaaagttgttaagccagggtaggatcttctccttacggcagctgacgacgttgatcagggtcagcacaaagaccaccgcgatgtacacaacaaaattgagccagcccttgttggctccatcccactcggggtcaaacatagttttcatgcccagcaggaactcagtcatgaaggcaacctgcgacgcagtcaaggtccaccatccaaatacattgatccatgcgcacatgtatgaattgaatcgacccaatggtgtatcccacagtcgatatacccagtaggcctgaccgagggcggtcggcatgctgctagtcaactcgcccagcgagagcgcaacacagaggttgcatgctgtgactagcagcagaccccagaggatagtaatagcaccaccattggtcagaccgctgctgagatcttgggcgaaggtcgaataggttccttggacatgttagcacacattcgggctccatcgggtgggggaaaaaaccgaaaacataccaagtacacagaaggccagcgccagcatactccacatatcgaacttccgcgtcagggcctgggaatgacccagatcagcgagatcctgtgcatcttgcgcatgctgatccgtcagcggtggcttaaggggttgcgaattgtattccaaatccatgccgtggtatttcagccggaggtaatatatgtcaactcagtgggcaaataagagggaaatgcgcccattttctgattgaagatcaatgagaagcacagaggggggaagcatgatttctatatatctggcgtccggcgtatttggttcgccttgacacctcgcggattctgagataaagctggagaccaattgcgagtagccaatgacgcggcggggctgatactaggttttggttgaatcagaacgattggtcatggacttgggagatgttgataatagaaacgatctagttaactaaaatttctggtttttgcggggagtcgccttcgggaggacctcctccagtgggccgtcatccataatgtccacagaaatgcactccacagataagaactggggtataattggaattgaatggtggaattgacgttggtcaagtaattgaatatcatatccaatccatggatgtaggtatttcgcagcttgttcacaaattccatccgccacacgtttcatagctccgaggtccgaccgttgtacctgaacagcttctcttcaatatccattgaagcctaacaaaagtgcgaattccagcaagaaccgcatgatctcaacaactatcttcccaatataaaaatcaatagcattgtaggttaacatcaaaatacagtcagtggcaacggctgacccaaaacggcaagtccatgcgtggccgataagaattaacgattagcggtgcggctccagtacggtttgggtgtcaattcattaaacatgctttggtgtgtaaatagacatcataatagaaacggtagagctgcatatctgcgtttcatatgagacattaagctgcatatatgtggagtcaataccacatgctccgtatgcgccatagccatggcttgaccggcggaagccatcgtgatatcaagatgtatatggggcaacagcttgaaacatctgtcaacaatcagccgagggtcaggtggcaggctcgaggatggctcgtgacaagattctcatcgaaagcgggaaattggacacgatggagtcggaatgcactttgctttgcaccactgaagcagcagctttgagctttgtccggggaaaactgccatcagggtccacttcttcaattgttgtttcgtaatgagaatcaacagccgtcgctaagattgaggaggtctcctcagttgggcatcgccgtagggtcctctcgatccgtctgaccccaaatctaaatcttgcccagctcaaccccacaaaaggaaggaaacggaagatgcaaacaccgagacacggcgacgtagaccaatgaaggacagaccgtagacgcacggtttggaaacagccccgtgaaccccagaatggttcaatttgattatcgccatggtggactcctacccgtgacagaccgacaagctcactatcgattgcatattctcaaactcagttcacgagaagtgtaaagtcgtctgatggcatccgtgcagatgtgtggttgctgcgatattaaggcacggcgcagcctagtcccaacggggagtatgacctattcaccctgatagggccacggggtttgatgagtggcttcaggaatcattccagtctctgctgcctgctataattagcatagtcagccctctgctgtccccttttcatactccttgctcggaattataggcaatctccggtgctatatttcgcttatgctatccgctccccctgatcaaaggccgcgtgccgagtacgtctctcgaggcgatactgtttaacctgctttgtagactcatcatttccgtcgactctaaacccgagggttgaataggctgggttctattcaatgcgtggtatttgccaggtcgaggcaatgttgaaagcgatatgaaagccggatccaggtcacgatacaaaacgccagcataaagtttggcagaattcaccttgctaaccaagagtggccagtcagtccagcacaggcgtcaaagatcacaagacgaaggaacattacttacactgcaggtatatatacgtggatgggaccacccaaggacaactatttccatatcgggaagcatcaggccatacccgcacacaatcaggaaaaagagaaaatttgagcaaaatgaatcatccgagtcttggcaattatattaatgctttaggacactatccatgaggtattccgtccctgtaggggaatcacaagtcacaaaacacttttgtggtcgccaggacacgaaaatcaaatcatgtctgagaagagaagagggccacatgagcccaaataataacactggatccggaactccaaaagaaataaaggaaaaatcaaggaaagaatatgaacgccgaccgggaccacgttgaccggctactctaagaatacaacgctcgtcgcggtcatgagaacaacaaagggaacaacaaagatacttgaagaagcagcagcatcactgtggttggatcggtatgcacctgatcaaagtcgggggtttttggtctgacgccagattcctcccgccggtagcaggttttgcttgagcattgcgagctccttgtgcaaggcctggttctcctgctgaatgctatcgatgtaggtgagggcattgctgaggatctcggacttcttgagagatcccgcgccaaccttggtatgtttttgaacccccgagggcgagatggcctgctcgagagaaacaaatttggcgttcatgttggtacggtagcgcttctcaatgatgttgtgggcggcacgcttggctgcattccgcatttgagggtcttggccgccggttgaggagtggttggagtctcgggagaagctacgggtcttgcgggatgtggatgtggtgggtttggagggtagaggagtagcaatctcttcttgcttcatctctggactggatgaccagcttgctgaagatgagcgagtcttgctctgtgtttgaggttgagacgaggtgtagtttgaagtcaactcggtctcgaaggcgtttgagtcaatggattgacgggcagcagagggccatgtttgatcgtcgctttcgaactcctgtagaaagattagcttctgtgacaaaatattgataggaagggtggacaatcgtacagatgagagagaagctgcgtcctcgggcatggagaagccactgattccggagctggcaaaggggtcgttgaagagatccttggactcgatgttggtgaggctgtcggcgaagtcgaacgagacgggctccatgtcggaggggttgatagagaacaggtcaatcgcgttgtcgtagctccagttggcagcgagagggtcaggtctttcgaagaagtcggctggtcgagactgaggactcaggtgttggctgaggtaggtcccctggtctatgcagagattggggatctcattggatcggttgcaagccatgatacacatcttggatcatacgttggcctcgaaggcaagtttggcagtagggtgatatagtaaggtgaaagagttgctatgagcaaagggtggcgaaagaatcgagtatttataaataaatcggaactgaagatatcatggaacaggatatgggtttcggccgcggggcatttatataaacccagagtaagccccgaaaaaaaacaggggtacgaaggtgatccggaacagattacgcctgtgtacgaagccgagattgacctgtgatgtcaggtttggaccagacgtatcgaaaatggcttagcctccggctggtcactcgcttgcagggttgtcgaagccgagttcacccctaagatctcaaacggccggctccgacgaggatattttccgatgggctgtaacgtgtgaaacggttgaagttaaaaaccgtgtgggctaggccttggcccaagactccgccggccgagtctcggacccgatattatgtatttttgtgtattttgtgtattttgtgtaatttatgtcttttttaatgtattctgtacctcctttcttgttttcacgggctttgtgttttttattttgctcttgctgctttgaacgggtggtataattgagacctggctgcccagcaggctatctacagcaacttggaagccaatgatgccgagtctgaacacttgccagtggttcattagaatgaggagatttccaactatgcctgatattagaagatctataactatgccgttaaaaaatcattctttcatcatagacaatgatactatacttccaagtagtcgactactccgtacctattgaccaattatatcgcacaaccaagatctacccgtactgcgttatacggacaacgcagccctaaattgatcctcaaccgtcttagtaaaagcggcattgtcagaacctatcagtatagtcatcctcggctttgcatcttacattccttacccctacggtaaaagttatatcctgtttcctcatctcgcgtgctgattgcttgcctcaccattatactttttgatagtcacctgtcgtcgactccatcgagccattaattttccgaaagacggattgatatgcagctaacccatgccatgctgcacaaagtctagaagagacgagagatcatatccgaaatagattgatacatctactaatgcaatatacgaatacgtacccgctcaatagtttgatgttcagagtttcttggaaaggtcacgtatattcccgggcagtgctgtcggtttccgcccgcttgtggcaatgtccacgaggcgtactccgtggtatcagttgaatacggtactttatgccgcaggtatttttcacttctgctccgtacatataaaactgatatgtcacagtcagatgcattaaacaacgatgcctattggataaaaaagcgagttggattccgtcgagtacctccgtagtgcctcgatcgcagtgtcgaccagtcgcgaagcagctaaaccccgcttattcacttttttccttcccaaatcggtcccacctgcccttcggagtggggtgactcggaagttctcattcccttgcccttcttcgccttaccctcccgatgtcgaccgagacgatacgagaagctcctgtctctctccatatttttgacctccggtcaacgtttccgcatggcatgagggttcgtctcctgatactcgggtgaatccttttggaaggtcgagtgtcgagggttcttgacgggtagacggaggaaacattgcatttgttagactttgtggcacatctgtggctaatggccatctcattctgatatctcagatctatcacaaccttaaaaaatcttccatgcaccgagtcatctagaccgaggctagcccgttacactctgtgttacggctccaagatgacctcgggagggtcagtccacccggcacgccttgacttagtggagaaataacgggcgctagacctgtcatctgcacagaatgtgtacacggatcttgactcgattccgggcccgactgtcctagatcttgattcgcggcggatctccattagctaggatctttccgaggtttacgctgggtcgatatgacgcagtggcttgatggctttgaggcttttatgttggtatgacccctatatatatacacatcatgaacgtccaggtaaccggactttcttgaaattcggttctatctccgaaaacaatcgattgagttctgaagcatacatgtctaaaaaagctcatccaatcaacgccttgagagtagtttcgaagctctccggttcacgccctaagatctcacgtagagtcggggtcacaaccgcagtctcaccccgtcggatagcctcccaagccgtagcccactccctcgacagattgacccccctgtaggtaagatggtcaccaatctgaggaagattcacgaactcatcgacagagatctcacggatcttgagcgatttcccaatcgcccgaccgataatctcaaccgtctccgcaagagagatctcccgaggcccagagagcagaagagccttgttcaaatacccaaagctggtcgggttcttgacatacgaggcaatcaacttggcggttgcctcgcccagctcatcgcgcttgacccacgccacacctgggcctgtacccgagtgagggatcgtaacctcgtccgttggatgcttcggatcgaagaatgcggtatatatcgggaaggattcagtgtagagaccctcgcggattatggtgtgggacactttctcttgcagagaagagaggtatttctctgtctggatatgggcgcccatcacatgagcgacactctggtcggttagatcaccgccgaatccaagggaggagtaaaaaatgtacttgacgccacttttgacggctgcatttatagcaagaatgtgtgcctggttatcattatcagcccaactcctccgtacttaggtgagctatcacacttgattttcttaccttggtcctgtgatctatctcgaatgatgcatatgaaaccagcatcaagacatcgacgccttcgaaggctgtgtctaatgttgatggcgcatcatagtcggccctccgtatcgtagcaccagcttgctcgaggtcgtgcagtttctcggggtgtcggccaaccagaacgagatcggattttgggactagttttgccaggtggttcacaatgcttgatccaaggcccccggaagcgggaaagacgccgattttggtacccattttgatatgtggcgagaatgatagaagggtaactcagtagtctgtagttgggaaggtatatataaaacacttgactggaggatttttcgagcctcttatatcctacatatcacatttcatgatcaaatgcttacaaatcgatatcagtccatggcaacaacgaccggatgcgatgattgtacaatattctctataattccatggatgtcgatccgttgccttttaaacaaagaatgttgcgccaaccttcagcgctgcctggaaatccaagtaaactccacccaactgagaggagtcacccaactgagaggagttatcccctttaaaattcattgcttgctcagcagatgggcaacctttaagcaaaggatcttgtgacttctttcattcgtcaatcgtaatttgaaatttcaagagatgagatatgtacttctaaatgcgaaacaaataacggccagggaagaaacaattagtctaattctaatcatactccgtgctcaatgaatacctcccgttccgaacaattccatcttgatgcgatcggcactcacacccctggccttgagactcgactccatatcgatcatgaactttccgggtccacagatatagtaatccgtcttggcatcatccaggaacaagtcctgatccttcaacttagtcaagtccacccgcccggcatggtcgtagtccacgccctccacctctccctcggaaggatgactcgtgtaggatgtggttcgaatggaggggaattcgtttggaagctcggagatgtgcaacttgaaagcacgcacgcgtgatgaacgtgcgccatgaatgaaatgcagcttgcgcgttgcgggtgatttggaaatcaatgtgttcagcatcgacgtcagtggtgttagacccacaccggcggagatcaacacgattgggttgcctgcttccgactcgacagggggaaggaaaaagtcaccgtagggatgggagacattgagcttgtcgccgatgttgactgtatcgtgtagcagatttgagatgtaacccgggtgagcggcggcacctggagcggctgggtcgaggcccagttctcttttcacactgatgcgatagtagtccggcttcggctggtcgctgagagagtactgtctggcctgcaagtgcttgagagccgggacgtaggtttggatggaaatgtactggccgggctggaaggccggcagtggtttttcatcgacaggggcgagatagaaggatgtgatttcctcggattctttgactttgttcacaatcttgaattctctccagtcagtccagccctcggcgtgttcgtaaagctgcttttcgcggccaatcatgatatctgcgagctgccagtaggctgcaccccatgcgtcgtggatttctggggtcaatgccgcgccgagcacctcgcccatggcttcgaggaggtacttgccaacaatcttgtaatcgtcgggcttgatatacaaggaggcatgcttgttgcagatcaactcaaccgccgagctcagtgcgccgagatcgtcgatatgcgatgcatatgcgtagagtgcaccggccaacgcacgaggttgatgcccattggcctggttggtactgttgaaaacggtgttcagctccgggtgggcttcgatcatgttgcgatagaagacagtcgtgatggtgttgccatgttccacgagaaccggcaccgtcgccttaatgagcgcgatctggtctggagtcattcccggattagaagccattgtgggtggtcgagtaaagaaaacgtttgatcggtgtctgcactgtggcttaattataagtaacagatcagaatatgtgagtaataggaaactaattgcatttggttggttgtcaagctatttatcttcaccgtaatcggattactaacagcaagaaaccgagtttagaaaattcggaaggcgtctggcatgatctgtgaagattttcagagatatctccgcggagagcaccaccgagaggcatatggcaacgcagcaagggataaagtcggtcaatttttgcgacctgcaactttagcttgtacataaaattgtctcgcatgttttatattcctggtacatgcagaaagtcatccactatgtaagctgtatgataggtgatgtgacccacctttagtcctcgtcgatctagatcctaatatttgcgagacgaggtgatgagtcttcgtgctcatgaaaatgaagtcgataatgaatagctctctgttcattgtgacattccttccatcttcctgaaggcagactctgctcttccgtctcaccgcttgccatgatctggcagaacacgtcttgacgaggacattcaattcattcaagatgcccaaatgcgacctctaaacagagagacaaatatctacgtcgatgagggtctttttttctctctgtatacaacttacaccattctgtatgttgagtcgtcatacacgtggtcaggccacacgcgagaatgtcgtcggctccaaacggcccggtttctgccgagccatttaataaacccgattgtccaggtgaccttgagagtcagaagatccgcctggatacttccttaggactatccaacatacatagtgttcaaaaagtctgttcccactgccccacttgctatccccctaacaaccatcgtggttttttttcttcttcctacacaccccccaatgacatttgagctatctgttactcagcgctcagctattatttatacccaccaggccggtgccacccagtcaaagctagcactcgattttaggtactcccgccgaacgatttacaatactttgaaacggttcaaagaacacaatactgttaaatctctcccttgaaccggtcgcccaaggatctttagtgatcgaactcgccatttactttttatactcgcccgccggcaccccttttggtcctataaaacgctgagttgtgctatacctggtcatccatcccgctctactattattaacgttttaaggctaaccggtcttctaaaatataggacaaaaaggaagattctaatcggaaaggaattagctcgacgacgatatcgttttattcaaaaatggcgctctgagtggtctagaaataacgtttaaaactaggtcttctcggatgagtattctatataacgaacaataaactatggaccacaatggtattggcgctttcggtcggaaggctatagaaaagatcttataaatactaaggcatacgttaaagatatttcataaatggtttagggtataatctggttagggagtcgatcagagttgattattatgaggcgggagaatattattaacctggaatcgaagaagataggatatactactatttcctatatagatactctcgaagaaggtctacttctattctatcgaccctgctctatcttttagcaagataacgctcggatccatactgctaaaatcatataggaatggtttgaaactcacgggatatatgtggaggagtagccgccgcactcactggatttaaacccgattgaacctatatggcggtggctaaaggttaaactttttgagttatttcctgagctgatatatataggaaggtctgaggaggattggatagtattcaaaaggtgtataaagatagcatgggatgctattccgcagtcgaagattgattcattgattttaagtatggggcgcagatgtatggcagtacggaaggcaaaggggtattatacaaaatattaaatttaaattttacccgagattggcatagggttcaaccctatttaattcgaagtaaattgagtaaagtatggtagtgctatgcatagatatgtagagatatatatttcaatgttcatgggtgaaaatgcgggtgggaacagacttattaaaccccactgtactacggagtacatgatatgaaatacacggattaggaggcaatgccgttttacccgttctgacactgccatcaaagacttttccctcctttttctgccgtcaacctggaaattttcacaggggagaagatattacccaacgaatgacagaggccacaaacacagactgtgcttgcctctaccatggtagtccttcatcggcgattctaattcgccagctctaacgtgcatagtaaattccgatctgtcaaaccctaaaggcgttcagagatctttcggtcgatctagatctcagacgctagcccaatcagagaagatcgacacctatactccgtacggagtagatagaccattggacaatccattgaaaatgacgtgtgggaagatctagacaccagactcccgcagccgtttgcggaaggcatactactctcgttcaacgttgactccaccaaaccctaaccttattattctctagctggggaaacaggagcctatcccacctcacttgggaaaagggacggaccactgccataaataagctccgtcgcagttgagtcaagcgctaatcgatcatacatggtccagttgcgacgcctccgtattgagtagtgacgtctcgatttacaatggttgtagtgcaaagaaagatggatagtagaagaggctgagattttctcattctgatgagacattagtcaactccgacttcaattagttctcttcattccggctcccttacccttcagaatgttgttcaggaaacgccactcaaccgaagcctcgacgctcaatgggacatccggttccagtgaacagggccagctgcccatgctgcggctcccagacaagctgcggtacaacttgctttgcatgctgggcgagttcgtggggactttcatgtttctcttcttctcttttgcgggtacacaggtgtccaataccccgatgccgccacctggctccccgccgaatacttccaatttgctgtattcagcgctttcttttgggttcgctttgaccgtcaatgtctgggcctttttccgagtcacgggtggtctcttcaacccggcggtatggtcatcaccatccaggaatgagaagatttgtagctgacattcaccaggttactcttgctctctgtctgagtggcggcatgccccctctccggggattgtatgtattccctgcgcaactggtcgccggaattgctgcggcgggcgtggtgagtgccctattcccgggcccgctcaactgcgcgacacgactcggcggtggcgcatccatctcacaaggactcttcattgagatgtttttgacagcgcagcttgtgtttgtcattatcatgttggcggtggtgaagcataagtccacctatctagctccagtaggaattggtctggctttctttgttgcagaactgattggtaagtgacggtcattatcggattactccacaacgtcctatgctgatccttcacactaggtgattactacaccggaggatctctcaaccctgctcgctccctcggaccggatgtaatcaaccgctcatttccggggtaccactggatctattgggtcggtcctctgctcggatcccttcttgcctctgcattctaccgactcctttgtatggtgcgctgggagatgatcaatcctggtcaggattataacgaggaagatgcggccagaaaggagtcgttgattggttcagatagtaccatcaacgccgatgcccctccaacatctagaagagataatgggtttgatgagcatgtctagcgctgctccattgtccgaaagcctgctccatggataactggcgatccatatcaaaccaacgttgggaagtactgaacaaatttttctattatttatatagtagaggccctcgatgttgccaccggattggagtcaataattcaaactggcaatgaggctgatgtataagtgtggatattgaattggaagcagatgcttggcatttttggaatacgagttggaagtggtcggcaaatgcaatcaagctcaagttcgctggtctacacgatgtacatagcagctacaacctaacagacatggtcaacgcaggtgtgtttggatgatttttactctttgggataaaagaagtgtattccccacgtcattttcaccattcccatctttaaattctggtgaaatcatgttatcgtttctgtaactgctttcattttcagctggctgtcctgttcggactctagcatgtctaaatggcagcagccttcctcaatttgcacttcttgagacatttcggacataatttggattcgacacggctagcttgattattccctcaatctctagggaggctgcatcggaggcaatatttcgcacaattcttgaactccgtcagaagtatggaatggacactgatattcactgtccctatcggggcacgttatttgtgatacactatatcggccatggtgtatctgaaacagaacagaagttcgggatatggtatggaccctaataaaacccatccattgtacctatagcattactgatatccactcccagtagaacacgcagtcctgatgcagttataatctcgtggccttccatctatcttaggatgaaggcagatgtcctcgttctcatggataaatcctactccggagactttcttcagccatgtcacagcttgcaaagaatattgtaacgcagtgagaattacgccgagtacctgttcgcaacaggcaacgagatttccgatcaaaacggtcccacttacgatgtaaacaacaattttacgacccgtctgacagaacttttacacgctgagccaccagtatttcgtactgttgtccgacttcacgaagctctctgtacccaagccaatgatccaagtactaagctgcgctatactcctcaatacatgggctgtcgcaaaccaacaaccatcctccattgtctcagtaatcacgggataatagagaacccgacaccacagagacacttttaagaataggaattataatttcttttccggctgcatagcagattttaattgaacaaacacatataaataaatatatatatatatattacttacctacgtttcgggtccttatttccgtgtctgttcttgggaaaacagttcgcggccaggtcggagagtggcagaggtcgctatcagaaatggaccccgagttgaccatcgaaggtgtttttgaccttcaggggtgttctctatgtcttctatcaatgccgttgtcgttatgggatagttttatacacccagcgtataaattcgtgagctacgtggattctcacaacgtcctggcatcgggtcccgttgctgatggcctctcagtgaccacgctaccagagagaccgaaggatcatgcatatgttgactatgtaatgctctctgacacggatgaatgatctggtgacacgatatgccggtgttttatctccatatttcgagggatatccctgctgtgatgaggggaggggtgtttctgtctttttagtctaaaccgtgaaacctgtgcaagattgtattcgtcattggtatcctttattactactgcttactctaacttccttattcgctcttgacctttactctaatcgcatcttaagttatgtctttgttcactctatataacggacaaagtatgctagggagtgggatcaataaaaaatatgttcaattggtaataaaatgctcgccatgagcatattaaaatgaatttgtggaatagccgaggtatttgtacagcctcagaacgccggcattaaatttctgtccccagatgctaggaagaaaatgacgagacaactaggaaaatcgtgaaaaaaggcgtggcggatatcatggctgaaataaaatccagaatcaatggagcgaggtatcaacaatttacagtgcaatcatgacaccaaggacaccggccataccagcagcaacagcgccgacagcagtgggacgagcgaaggccgcattgtcagagacagaggaagagctagacggagacgcggtggaggaagagccggaagaagactcagtagacgaagagccggaagaagaatcagtggaggaggagccggaagaagaatcagcggaggatgagtcggaagatgtggtggacactgcgctggtcagggtagtggactcggtagcggtggccgagccggcggagtcggtaagagtagtctgagcagaaatggcggtggcaacccggctggtgatctcagagccgatggagctagcatcggtagcgacggcagaagcctcactcttgatggatgaggcggcagcggcaccgccggtgctcacggcctcggcgatagaggtcgcctcgcttttgatggatgagatggcagcggcaccgccggtgctcgcggcctcggcgatagaggtggctattgagacgacatcggatccgacggattggccaccgtcgacgacagttgagacgacgcctgtgacatcggagacgatagagttcacgtcaacaccgtctggggaagccatggcagtggtggccaggaagagggcggaggagatcagagtgaacttcatattggagaaagaagaacggattggaagggtgttgtgtgatttaggaacaggatatttagattgtaaattaaaatgataaactggaaatccggggggaaactactgcttcttatatttggtcaatgggcactagtctcctatagatagaaacatcggagattgattgcgcctggatgctaggcagccgaggtggcagtggcgacatgagctcagccttgtgaagaatgattctgatgtcgatcgtagggtccattcagggatagaggggctatgtactcactccgtaccgtgttagagacctgtacagggtatcccaccagacggctttgggcaaattatatcatcccgaggtcctggggtccactttgtaatgaggcgcaagcattggagccgtttcaacgccctagtccctttcagtccctgacccccggaaaccaagagttagacgtgcatgttctatgagcttgattctcatgttctcgcgtgagcatggtttgtcctactcgtgagcaattcaacaacccacactccggaaaattcacatcgcagcaatgtttgggtattttgctgccttagcgatcccaacaactcgattcgcaccggagacaccggcaccgtccccgttggggtggcttggagatcaactgcccacaaagtggtagacaaatggtatgaaagcgcgtcttaccgatacagtgggtcaactcctgctcggcgtccgtcattatgtataattgtgacaatgaatcccactcgcaatttcaaagtatctcgacccctgtggcatttttggctagtcaaagatagccaagggatttcaatgacgcgtcatgtagcaggtttgagcgcctttaatattgcaaaggggcagcgaagaagccaagtgaatctgaatcataactggtcatggacgcagttgccgggggcgatgcgggtcggaatctatccaccggtcggcctgaggcagcacataaactcacgtgccagtgggagagatcaggtcatgtgggcccgcctgagacctcacgttggtcaggcggtcaatgctcacgttgatacccctagtttaggcttatgtaaatgctgtttggtctggaaatgtacggtatctttgattagatcatcccgttttggtatgaaatatgtggtatatttacaagggatacattcttgtatactagttatttactagttgtttactacctaattactgataaataactctacatcgaatatatatatctttggatatgcacgtataactacttacaaaccattgttccaattcgtttactagtagttaccatggcgcattatcaatctacctggtggaaacaccgctatcataagcttgaagagcttataaaggccgagcctattcctgaaccagacgagcctgcagaggcagatgtcgagctttacaatgcatccgatgatcggatcctgcatgagcgcaacgaatacgaggtatgtttttgaagaaatttactagtttcctactggtttgttactaatatttttcaaatagggaacggaagatgaaccaactcccctaacagaagctacccacgacgcaatatctactacagagattgaatatgtacctctccttccagaatatccgcgtactcatccgaaaggctatgcatatgtggttaatctccgacatctctcttcataagagaagaaaaatgcacttaatctagtaagttgttatataatcatcgatattatactagttattaactattttactaggtccagtacgctagtaggcgtgatggcggaaaaagtgatatttactgctccttccttggttgccaagtcacgaagacagcatcttactattccggcatgaagcactgtgttcatcttaacgactatctccgtaacctctcccatacagaggttaatgaagagcttgtagggcgtatgttctctataaagagggatgctcgacagtcataccaatattcgcaaccctaacgtgaagcggtagcgtatgcgacctattttactaatattttattagtagctaacaactatttagtttctacgatgctcttcgacagaaatttttggagagaaaagcttgtaaaaaagcagacgctacctgcgaaatggtctacggaaaattcaaccaccaggtaagtaaattcgttcttattctttttactatatctttactaatatatagcctctaataactagaatgtagtaggagaggaattgccattcgttcgttgttctaacggctcagctagtaaccacacgaatcattactttacaacattatatacaaagcggaacaggctagatatagggcttctgattagtcttcttcaaaaggaacagagggaagttaccacagaagtatacactgcaatctaccaaactagctcacgagcccaattttgcggtatgaattcatattactagtatattattattgactaactagttttatagatgttgtgcacctaggcggacgcggtgcgatccagagacaattcccacaatgcacagttaaattccgtacatttgtgccaaaggatatagagaagcatccatatgctatcttttactctgcagggatacataaccacccgcccccgccaccgagtaagccaccatacgaccttatagaagagctttggaatctcttatctcggggacaaacatcggatcttacacttagtaagtaaccttactagtattataatactattttattagatactaattagtatctataggcgcgtttcttcggagtgatggggttcgagacctcgccgccagatacggcgctcaaaccctgtctgaactataccagagctttgcaaataaagagcgattttctgtggtccttacaaaaaggagagcaattgactatccaatgggtagacatttagtaggtgtttacttcgagatggagaaaaatccggctataaaggtgcgttttactagtatattattactactatgctaattatcctttagctctatgtacgcgagattgtgtataatgaaaaaggtgcctttatattttgtgcccttaatgaacagctcgagatccttgcttcattacattcattcgaagttgatatgtcatataagcgagtgaaaggcgtttttaacgaggttatcttcgcaacatttgtcccaaagcatggaaaaagtttgttttactactattatatcagtatccaaagctaatatcttctagttatgacgctattccgagttttcacagatcaggagactacaaaagcgtatcattttatatttggaaatgtctttaatctcgtcgagcgctgtataggtaagaagatcaagttccactatctacatggtagtggaataaggtctattatcactgatatgtgcccaaaacaaatgacaggtaagtattataccttttactactattattacagtaacttactagtattagggcttggaaaaatgctccaggagactgaccagaaaaccaataaccgggatcttggttggagatggcatactatgaatgttcttatcttctgtaagatacacttcatacgtacaattaacaaattggtgccagcaagccgggacccagaagatctctcacatatagagggaagaagtcgactagccagcttaatggactgtaaaagtcgacagaattattaggagttggctgaccttattatcggtatatatttccatttgaaaaaactagtattttactaatatttatagcgcataaccctgagcttaagggttgggctgagcataagaagatcgatgttattgcagctgggctttgtaatgcatgctcgccaatagactctatgttcttcgaggaagcgcgaaagcatacaaatgcagtagagcaaagccactataaatcctatcatatgggtacacaggatacgctccttggtacagtcacgaagtgagtgaatattaattatttactggtattctaccatttacttacattcatttaggtcaaagatcctcgacgaaaccgacgtacagcaataccatagccgtgaagctttcgatatcagacattcctatcatacagatgatatgcagacacggtttagtaagagtatacagcgagagggtatgtatatttactacttatttactggcatctaactaataataattagaatctctgcgacggaaacgttaccaagtcctagatgatgatgtggcccctgaggataaagagctttatgagtttaactcttcaggcaatcattcaattcctcgggcaggatccaaaaaggctaaacgcggccgtggagcaagcagctcacaaggtcgttcaacaagtcgtgcaatgtatgtactctttactagtatgatactaattactgactattgatagcacacccgctgtatctaatcttcggcatactacgtcagtcaacactggcaataacagccaggatgagaatagcattgagagtttagaagatcagaggaaaaaggttaaaaaattgagggaggatcttaaacaacaagagagacagttagtactacgggaaagggaaaatactctctagagatagggttgcgatagggttacttcatatacaataatgtttaatatcttcaatttaccagttttatactacttttcactatagggttatggcaaacgccatgttttttttattttttatacagagaaacactagtaaaaagcaggataagcataataacaacctttcgcaggaactccaccaatagcagccaaagtaggaaaatactagttcttcaccagtaaagaaaggaaggctagtagtatcactcttccatttcctctccctcttccatttcgtctccctcttcgttatcctgttcctcatcctcctctacagcactagttacaaacagctcaaaattatcacaccggtcagcattagcttcacggcaacaacctaatactagttaataagtagtaaaaagatacatttcttgataatatcttaccttgacgatcatttgcatccttacacggctcacaaggaacctgaccaccaagctccttagataccttacgcatattggtaaggtgaagctattccaatattagtatataatcaaaactagtaaattagaagtaactcacagtgccatctgccttacgaggaagctcaggcttcacttgtactatagcagcaacattcgcgtcatactcatcccggatcgcaatgtagaactctattagaggtcagaatactagtaaaaaagtagtagaagaataccataccaacggcatcatgctcatcctgtaaagttggacgaccacccgaactcgccaatttcatatcagtatgcttgtctgcataatgcttcctgagattgttggtagacgtagcaggagtctgtaaggtaaattagtattagttttttactagtactttaacaaagaaatgaaggaaatgtcaaagaaaacccacatctttcgggcagttggcataacgacaaaagcgctcgccgaggaatagatcgatttccccctgtgtctattctctattagttttattcattttattagtagataaatagtatgctcacattgggatcgtttagttgagggagatctataccctccctcgatttcagggtgcagtaccatcggtatgcagtctgaatgcgaataactgttagtttcatcttcaatctctggcccgcctgagacctcacgttggtcaggcggtcaatgctcacgttgatacccctagtttaggcttatagaaatgctgtttggtctggaaatgtacggtatctttgattagatcattccgttttggtatgaaatatgtggtatattttgtacatatactagttacgatcgtttagttgagggagatctataccctccttcgattttagggtgtagtactatttgtatacagtctaaatgtgaacaactgttagtttcatcttcaatgtatcgtattttcatcttttctaggaccttttcatattatcttatagggttatacttatatacatcgcgtacttcactatggtagcggtagttatatgacaagtgatgttggtggttatataactaataaaaaagtagtatggtactggtaagagagaagtgggtaagttagttaagggaagtggtaaggtactgaaacccttaaggcacacaagaactcttggctggtagcctcaggctgctaaccctactgaactctcaggcgggcccacatgacctgtggtcactgccagtggcgatccgctaaaaaaagaaacaggggaaatgccatggatggaacatgctggaaattggaatagagaagcaatgactttcattaattattatctgtggtttaaattactaacaaaatgcatatgtccagtgatgatgatgcaatgagacgatgtcacgctgtaaactggccgtacacctggatgatggcttcccacccgccttggtggtctgattgacggggattgctctttccatcgagcaccattacatccgtcttgcgcgtgctgatcgagtaccaaaccaaattctgagggtcattcgtcacccgcatcatgttggtttggcagttcccctcgcaaggcatgttgtacagaccattccagtacccgtcgaaaaacgcccaggcagctgagttgtacagcgcgatgttggatccgccgtcgacgttcgtagctatcgcggtacgacacttttgatcatctgcagcacaccacgagaaatcagggtcaccgtatttggcgacagctgtccatggcgctggtgcggcctggtactcgccttggccttgcatatacggtgtttctgtttgaagaagacccgcaaagacgttctgggctttgtggaagttgtagttatacagccagtgatgctcggaaccggttccagtcagccaggtgcccttggtggattcgaccaagattccgcggcctgttgagataatagtgagagctgactcgctatcaaggttgtgatcggcggtccatccccagaagttctcaatatatgcggacgaactgttggtcaggtgcattaccataaacgcagccatacagtccttggggttttgcgacgtgcaagcactggagatacttgtgtcagcggtcccgcccaccgtcaccatcgtgttccaaagaccgatatcgccgggctgagcacctgcggcattgatttcaatgatcttggcccctggcaggatttcgccaacggagaatctcatgtcctgaatctcaatcacaccgacgtcgccaggattgccaagttgaacgacaggtctcggattgccggaatccttgaacttctccccatatccagaaataacagaccatgcttctccaacaatgcgagttccgactgggacgaagatagtgtctgagactcgatatacaccaaaggggatgtatgtcaccttgcacgaatcggcattttcagccaagatagcgttcaggcctttggtgtcgtcagtcttaccgtcacctttcactgtgtgtccagatacggtcttcacatttacaatatccgctgtgctgtaatcttgataggtgggctgggccttcgtaaagtatttgtctccaaccagcaaagcggccggccgctttgtttcccagctcaccccagtctggtaggtttctggaacaacagtgccccagacccatgtgtcgacatgagcattagcggccaatgccactttgccctgagcgtcgaccgcgatagcgttcgaagtatcgtgcttgaggttctgaatgagaaactgactattttggtttcctgaatcatgggacgagtcatagaatctgactactggtcccgtgttcgtggaagtggaatctagaagcactaggctacccagtccatttccagtcatatcgataccagtgccgcagctatcaaaagttgcttgttggagcaacaccgtccacccacctgccgcggagaatgctgttttgcaagattggaaatagatgttcttgaagttgacctgttggttggagttcttgatcccgatagctccgccaataatatcctacgctttgttaggctgctttttcttcttcttgggcttctctgaattacttaccacatccgtgacggcaattgttgacccggcattgatatcaatcccagtgtgacccgtggaatcttttggcatgcgaatcttgacatttgtcaaccccgacccttgggcaactccccactgaagagcagtgaagtggcggtccgggctgagggctgtcgtatcaacgatcacattcttgacaagcgttgcaaagctggtttctgggttgccattgtttgaatcgtaccccatgatgagatagtcaccacggaaacctggtgcagctttgatgatgggtgggttcaacggattgccaacaattatcgtaccaacagtcaggttgagagtggtttcaagctggtacacgccgcctggaaggtagacctgggcaggataccgcgtgacaccttgacccttgcgactgccgcccgccccatcatcgtctatagccttctgtaacttcggagtttggttaccgctgccatcattgacgaccgagtagtccatcacattgcgatacaccgggtagagcgacgttttggcgtagggagcaaatcctgctccttgctgattgtggtcctgctcgtccagccagtaggtctccggtgatttggtggtaggggcagcacatgtttttgtcgcgggcgaatgatctacttgagatattggactggacaggttgtcagcaatcaagtatcctatgagacgttaaatgacacatacgatggggttgaagcactggctgctgtcgtagtagcctgtgccatattcgaggaggagccagccacctttgtggccatcaaggtatcgtcagccttggatggagattgcacggtcgtggaaagagtatttgctataacagacgaagccttggtacatgcgcagtcatgaacaataacagtggatgatgtcccggtcagacctgccaaagaagatgcaagcgcccaatcaaaagggtagtcattatttgacggccttgcatgaacggttggagatgaaagtgcgtgcgatgaagacgcatgcaccaagtctagaggcacaatggcacctgatgttgtagacacaaccgctgcaattgcaaccaaagaagagaagcccctcatattcgatcgaccacaaaccacaacctcaatctcgaattagacagaaaagagaaaccaaaaagggaatgaatggatactaataaaaccatcgcaggtcatatgtcaggttttcttgcaattagcatgccaggtgatcttggaatgcacacgatcaccttgtatgaagaatgtatgtataggctttgttggtacatcttggctgaaagggccatgggtgatcgacgccccttgcaagactcgggattcgcaaccttcaggcatactatcgctataactccccttgtatcgccgaatttgttgatttcgtggaattctaggcttacattataatatgctgcatggtctccatcctacaaaacagtattaaatagcttcaattggatttacaacattgtgtagctcgaaccgttaaaggatctcatgaatatataccaaactgtacactatccagatcagacaaagtgatgttctaggttgtatcttgactcctaccatcgttaatgcctagctaacactcacaattggcgtcaatgtgatattggaaaataataatcagatgtgttatatgatgtgtttctaatgctctagactcgtgccacgtggtaaccggtggaacgtcggcacaatcaaggttcctcacgacaccccttgcattgggtcgaaggtccccaggtagtattgatataaacttccatgccaatggtagctatgcagcatgaagtatgcctccttctgattgcctgccgatcttatttgttagacttcatctccatgagtattacctcggcaggttctatacaaaattatacatgagtcatattcatgaggccgtcaaactatgacttacaataattccagctttggtatgtctcttacttggaatcttgcgctttctgcaaattgtaactataaatggagcttaaagttgcgtatctacaacatcccatactgcaatcgtcggagacagggaattgccaatggaacaaaatgttagaatctgttctctagggctgctaatttatctttctaaagcaactgcataatgatatttaggatatgtgaggtggcgagaacctacaaggccgagatttgcgtgggatagatttccgacgaggcgacacccgcaaacaataccctatgactggcgggaaaagggcttagagtcccgttgagttgatgatttcttcctttgaactgcatgaaaatgaattccctgttgattgccaaccgtggttcacacgtctaccccaataacgtctctgtgagctcatctagcgattatgatagcccaatttggcacgaagatcctgaaagcattagacgaaagaccttgtatgattcaaaagcttcatcgaaaagaggttcacaaactacaaactcattcgtccccgaacgatcggagactagatgttggcgaaggagtgaaaaccacgcgttgccttcatgtcggacgcatccatcagcagcttcaatgatgactcggacccagacaatacaacctcgtccgaagtttggcaggatgcgccccaaaccagtccacaagagaaagagtcatcaccccatattcgatttcgatcaaatgcgggtttcatacaggaggccaagcatgacgaaccgccaaaagtttttcgcgaagaatgggatttggctcaccatgaagggctgcctcatcggccgacaatgccatactcccatgagtctgaggatattgccgatacaccacagcgagatcgtgagccacagtcgagtgagacggacagcgagtcaggtgtccaaaggatagaccagaacaagcgaccgggaggtgagaagaaggaagacgagaagaaggaacatgagacttctgaacagcaatccacactggagaaatggcgaactgcgaccaggaatttcagacggaaagcatcagagttcggtgaccgtctgggtcgcccacaggccgagggagacgacttaacatccgggagatatcacgcggactgggcgaccggtggtgcacctccactctctgatgtgacagatgacaagcacaaaagtgtggaggcgaagcagcgcgaccagaaagggactagctcggaagcccatcgtctagtgcgagatctgacgcaagaccattcccaaaaacgccgcaaaggccgtgggaaaccttatcctcaccccgacaacgaatttaaagacgaagagaatgagacaggagcagatgcgagcttgagatatcgctctggcggcggcgggatcctgtcgcagttgatcaaactgcagggtggtcagcaacaaggtgctggaggccagtctcgaacatcaactgactcatctagcagcgcagaatcggcccccagcggggccccaacaccaaaacctaagaagcaaaagccagtgaaatggtacaaaaagcccaagaatacgtcgaactcgaccttgattggtgggggcgcagatagtttcagtggtgcaagcactcctgtttcaagcgaaatcctatcgcaagcctcgaggcgccgtgacaaggagggtggcggtggcggcggtggtggaaatcgcaatatgcggcttgaggatgagattcgagtgacagtgcacattgcagaaattatctgtcggcagtggtatatcatgcagctctgcaaagcattgatgttatttggtgctcccacacacaggcttgaagagtacatgcagatgaccgcaaaggtattggaggttgatagccaatacctgtatctgccaggctgcatgataatgtcgttcgacgatccatctacccgcacgacagaggtgaagatggttcgagtagcccagggagttgatttagctcgcctatcggacacacatctcatctacaagaatgtgatccacgatgtgatcggcattgaagaagcaattcaggaactcgatgcggtcatcaagaaaaagcccatatatcacaagttcatcgtcatcttggtgtacgggttggccactgcaacagtcgggcctttcgcttttagtgccaggccgattgacatgccgatcatttttctcaatggtatacttgtcggtttaatgcaacacgtcgccgcgcctcgttccgtgttgtattcaaatgtctttgaagtgacatcgacagtggtgacgtccttcctcgcccgcgctttcggtagtatctcccttggagtcgtgaatggcaagccacaatacctcttttgcttttccgccatcgcgcaatcatcgattgcattgatattgccaggattccttgttctttgtagtagcttggaacttcaatcccatcagatcatcgctggctcgattcggatggtctatgctctcctcttctcgttgtttattggatatggaattaccgttggcacaaccatctacggtctgatggacaaccacgcggtctccgacacctcctgcccagacaagggagcctttaagaatccatatgttcaacgtttccctttcgttgcaatccagacagtctggcttttgatcatcaaccaaggaaaatggaaacagcttccacctatgatcatcatcgcaatggcgggctacattagcaactacttcagcacgaagagactgggatcaaactcccaggtagcgaatacagtcggcgcgtttgtcatcggcatcatgggaaatctgtacagtcggctctggcatggccatgccgcgaccgctattctgcctggaattttcattctggttccatctggacttgctgcgacgggatctctgatctcgggtgtacagtccgcggatgaaattcgtcaaagcgtcgggtctcatggtagcagtagttcagcgcccggcgctggcttgcaatccaattctatattcagtctagggtttggcatgatccaggtggctattggcattacgattggtttgttcatttccgcactggtggtttatccatacggcaaggcccggagcggactatttagtttctaggctttttgtcacgccgttgacagttggtttctgatgttgatgttgatattgggataatgtgcataacaaaaagaagaaataaggaacatattctacgatgatgagtactgtaattcggcccatgtgaccaagcgcctatttagggaaagtagcatgatgccctaggaaacttcaactgtcccatggattgtactaatgctacatacatccgtatatgtatgattgaagtcagcgcactctcaaaccagccgtcacaactcagaaacatacaaaattttctacgatgctattcttctcactcaagaggggattcggaaaaaggagcgagttcttcagacacccccgaagtccccgcgagattagcagattcacagtttggtcactattttggacccccttcatcctgggtaatatctggactgcgaaagtaatagagcaggagagcaataccgacattctcattcggcgagagtaaatctattataatacccttacggaaatacggcgtgctttctaatgctcagatacctcccatactcgagcgatatcctgattattcttcaaattgccggccggtcgctattcccgaatgcctatatgagtcattatcgacgaagaaagctcaggttaagagcataagacagagaggggcagatgggatagaagaaggggactatgctacgtgggcgtgttcggttgcgcagaaatgtgatgagaaatggaagggagaagtccagaagagggaagagagggatatatctagttgggggtttatagcgctttaagtttcttcccaggtagatagctatcgtgggaatgaattgaaccagccaaggcacctttcccgttgtcttttgtgagtgaacgaaagcatgatatgaatatgaaggttatcaaagtgaatctccaatgtattaggaacaaaatacctactgtatgctaaagaatcaagtctagcatttctaggagaatagtgaacgaaatccgacaacgcaatgcaaatatgaaataacataagaattaaccggcgaccagtcgccagccagctcgctttaataccataggccctaaggtgggtcggggagcggcgatagaatcatgtttcgaagatattaagcgtgctctattctgtcatcttgcgtggttgttatgacctttttgtgatcttgagagatagcatgacccagaagttcgagcaggtgtcgttcgcgatatgtgaagacacgaacaccggttgtttgtaggaatcgctttgcatgctccaggatgagctctagatggatgggaggaaggcgaaagagggtgtcgagggagacagtgatttggtccggagaggtgttgagagatggaaatgaggcaagaagatggtgggtggtcttgtcgcgggcgagggactcgcagtatttttcaagcatattttcccggacaatgaagtgaagaatcgagtccaaggagccgggatggataatagcctgcggtagggaatgttcaaggtcggcgagagcgcgctgcattacaatcacatattgcagatcttcaatgagcggtagctctgttggtgatgtatgaccaaagagtgggcgatcatagccgagctgctttcgccagaaatagttgcataggattaaagaaataatacacgggatcaggacaacgtatccccaccaacgctcggcagtgaccattgaagcggcaccagcaacaagaccattcaacccattgacaatggcatgccattggaatccacggaaccgggtatgtagacggcgacgtatatcatcactcggctcgcgggcaaaaacagcagcgttgtacacatggaatcgatggaagagatagccagaccagatggcattgaaaaggccaaacactgcagcgagaccattcccaatatatccagacagcagattactagctttgaagacatgggggttggcgccgccaatcgccatcaaagtgccaacaccgaccaacaacgagccgaaccccatcaacacatccatcacgatccggtcaatcacttcggtgccaatttcacggactccaaccccaagccggctgtcaatgagccgggctagttctgcgttcttgcagtggtatttccgcaaacgttgtaggtgagcccgctccgctcgcagcagcttgacattgatccagctcagccgaaaatcatgaatagcaaccaacaccattcccaatgctagtgtaccaccaattcccatgagcacagcggcaaacttcggaacgggggtctgattccagacgttggcagcgaagtcaccggcgttggctagctcaaggtacccgacactggcgagcaagctgtttttgaattgctgctggtgcagtagacggaatcgaccacgtcgccggactagcacaacctgggtttttttggattccagggattcctgccatgtgatgtcactggcttcacggatgagtttcgggaccacgggtggtggggactcggccgttgatagtaagtccatttccgtggccatcgtcgtgggcttggaaattgactgtgcgaggtgaacgggagatggaggggtgaataaggtgtcagaggaggtggtaggggtcaccattgtaaaagtcgtatgcgggtgaccgtaggaaggagaagctcacacggggccatccatgccgatgctctgtacaaccgagtttagagggttgaatgaagattaaattgacagcaaggagggggagaaagacaggaggagatacaaagggacaaggagacaaagtttcgaagaagaaaagacacgcaagcacgtaagaccagggaatcatccggggtcttgagagttcacgggtggagcaagacacccgccttggcgtagccctatagggctgaacatatacttcggtttgcaggggatcattgtccgtgaacgtctacggtataatattgtacaaaaaaacctagctagtaaataaattgagtggaaatgagccacaggcatgatccctcaactcccaatacttacattactgggtgatacagcccaaccaatccaaggacctggcgatctttacatagaaaatcctaggcagcgacctaatgtaaactgtaaatatggtctaaaaatacataggggcgagataatctatgcctctttcgaagatttaacatcccctgagtggggtgtgcttaatgcacgtattagcttgactcctgcgtctgccatatccccggaatgagcgctccagaactgggcctcacggtcggatccacgaagcacatcattccagggctcttctttggtcggagagggagtgccatcgattgacggctctatttcattcgagctgtatacattgactcgttcgttgaaacgcacccgatgacgagtgcgaccgttcggcgagccctgggagccggaactgagggaggagttcctcgccagactagcagcaagataatccttgcgcactgcataccgtatagcctcttctcttcggatcgaatccgagaaaatcttctcaagggctgtagaagcagtgaatcgcatccccagatagacctgctcggcgacgaacaaagtcaacagaagcgaggagagccggacctcggaaataggaccccgatagacatgcacaattgccgctgtagatagagtccccagccaggccaagaaatctagccccaatagacatgggccgatcgaatccgaccggatgggtggtggtcgttggcactccagcgtgagcttgaagaagtcaccccgcagctccaaccaattattcaacaggaagccgagcggaaccagtggccaggcaactccaaataatgcgagatagccaaactgtacacacatctccatgatgtcctcctccacatggtattcctctgcgccggcctcgctacgcagtcttttcataaatgctgcttcgtctggagagtcaaccaagaacgagctagttgttgcggaatgcttccgtttgcggctgtactcggcctttccatcccgatagttttgccacttctgattcaggacatgcttcacatatggcaggacaacttcctcgccgaagctaagtacctgagccgtcatggaaagatatatcacctcctgctggaatcggcttgtatcgacctcgaatttcttgtgcccgctggccatatcggccgtgagccccgttcttcggaggatgtcgaagtatggaacaatttgtttgccgaagggaacatagacataggcggtcaatatcgtggggaggaaggaagtgataaaattcatgacgaaattcttctgagtcagggcaagatcgtattgatcctgcgttcggtagttctcgtacttagtcaagcgggttgcgatgcttgtgagaaacgaggtgatggcgggcaaggatagcgaaaacaggacggtcggtacgaattccagatactctttgaatggaccgtcgtatacctcggatatgaacacctccgatgcgaaggaggcaacgatcaatgctccgagggccacgcttgcaaccgaagcaaaaggaaccaaaagcagctggcgtaggaactgcttccaacctgggaagacatatttcacttgaccactgattgggtccttgacctctttctcccagacgtactgcttgcgatttaccttgagtcgcccaacacctttgacatcccatctctgactcaaatcggcctctcgaatcttccagtactcgacgaatacaacgcaccaggcacaaagtacagttccatacacaatggagtatggacctagatacagccacccaagaatgcccaatcctgcgggcaccacgaggaataacgaatagcaatggataaaagcgtagtagaaagcgacctgcacaaggttagctgtttgtcattaaaccgagccaaaacagtcacggataccttttcaccaaacaatgctcgaatcgcatccagatcgctagtcgtcaatacagtttttcgattccattgacgaagcatttgcgcgcaggcctcctgatcgtgtaagggaaacgaggcggtgatgttcttccattttccaaaacccggcgtgatgcctgcgcctcctattttcttttgccaggtgacggcatggtataccgaacgaatctcttcggctggtgtatcggcgtcggcgatagctgtctcgtcgccgtccggtaaggtatgagtaattccaaacagccaatccttgattctgtgaagtgttaattgccccaaaattcaatcgtatgacattcaagacccccaaaccccacttaccttgactggtgtactaaattcccgagatgatcccgcggaacccgaatgcagactaatagcgcttccccgtggccgtgacgaacctgaacccgaaggccagcctcgcccaaatcgtggatcagcgtccgaaactctgtaatagcttgggcttgatctgaggatcattagtatatatgcaaacggccaaggggatcccacgcgatttaccgacgtcgccaaattcatattgtaatacccaatccacgcccaggttatcgttatcatcttcgtcattgctataggccgcgagccaggacatgttggctaggtgtggcctattgagaagagcaattggagggtaacaggtggtcagagtggttcaagtggtcaaacacgtcacatcaaaagttgaaagggaaaatgtggggagattgcccttcaaggttgtcaccattacattattactctagttagttatgtatttttctatttccttctattttggttccacccgggtatacggtatatcattgctgaccacacagccctaccatttcaactcaactgctacctgaacccccgaaggactacaatatccagttgagattcctgaattgcacaattgccttccccagttcccatccgactcctacatacagtcgttatgctaccggaaatacgagtcagccccacaagtcaagcttcagccctatgagggagatttcatttgcatgaggatccagtttgccatccaatgataagcaacttacgatcaccatttctcaccatttctctgccatgcccccttacatgttcaggggaatcgcaattgccttttaagccaaaggaaatactcgaatgagttaatccggcactatataggcgacttaaaggactcccctgttcccaagggatgcgctgtggggtccactgcgggcacgtgcagttgtcggattggcgggaattggctagggctgaacaggagagagagagcttctggttcattaacgccctaagaaagcccccgtgaaagggccagttctctggtccagaaccaattcccggggtatctcctctcaggattggcagactgttgggtgaaatgctgttgcctacaaaactccatgccaagccactaattcgtgatttgcgacgattccaaggaaaacccacatttcattggagatccgctatttgcggtgaaagttccccaacgtatctgaacaatattggtgccaagagtggaggcgggaaaacttgaatccatgacggcgatggcgcaggcatcaacaatccgcaggtacgggctattacggagtacatacagctttctgctgaaagaggtgctctcagccacaatgttggggatagtacccatccggcgcttcccatcgtggctataagtacatggggtaacatgcacgaccgagcgccatgagatcatttcccacgaaaaaaaccttttctttcctggcgattattcacgttattcacgtccctagcggcttaccgtatgtactcgattctcgagatcatggcccgtcggtttcctcgtgggcagaatcttaccctcgggttgagtgtcttcctctttatcttcatgtttctgcctacctttgttattctgctagccgtcatcgtattctttgggctggtgtatccgcgattacgcaagtcgtacagccttgaccccgaaggagagctggagtctcggcagtcggaaaccaaagattgaatgatcggagcatggtatgaatatatgcaatgtgctcggttatgttcaatcactaacgtgtgtaaagataccatctgggtgtaatactattaaaccctgctaccgagtccacgaaaatgcattgacgcttcttttttttttttgtcggattgtgcaccaagcacaggatttcgagggcgttttgggtgtatcttattgagttcaagaatctgaatgtttcatgttatttcaactaaatgaagatctctagtcataagatcttgaatagagaaacatattatttcttgcaatcctgctgtatattaggtaaaagataaacctgaaacaaatgcctagcaagtctagaacgaaaatcacaatgtcttacatatatgtacagtcatgtaactaaacattaactagtacaccattcgtaccatgactctaacgggtagggctgacacggtacatggttgaagggctccttcctctttccccgttcctcccgaggtctctccgttcctctttccccgggtcatctccttcatgaatacactggatcaaaatccccatccaatcccatctccttgagagtcctcttcgagaacatataatgggctgaacagattcattatcttcatccatggaagctggatctttccagaaaacagagcagcaccccctaaataacaccccgctcaatatctgatggcatcagcccaaccgctcagggtattcatcatctcacccgcctctattctgactcaggatgcacaacaaacaagaaaagcagctggaaatcgaccagccactgcctgatcggtttagcttcttttcgtcaaaaacccgacaagcgaccgcctcgtcgacatgggatggtcttttccccaacgaaaacattgaccatatcttccaggagaagcttaaaagtcgcccagatcccaaccagccaatctggtggattgacatatgcgacgccaccgaacaagatgtcaatgccatctcacaagctttgtctatccatcccctgacggcagaggatattgctattcgtgagccccgggagaaagtcgacgtccacaagaactactacctgatctcgtttcagaccctcgtggtaaacaaggtcaatgagcgaccgggaattcccgtctcggctgcattatacattcttgtcttccaatatggcgtggtcaccttctcgcctagtggttgtgggcatgtggctcgggcgcgagagcggattcgcaaaatgcatgatcccactattctgacgagtaactgggtttgctatgcaatgatgtgtgttcaaccattttcccgctcagcaacccccttttcaatggatgcacggctaattgatcttcagagacgatatcattgacagctttgggccatttgtccgggaggtggagcgcgagtccgaagcaatcgaggatcaggtgtttatcagtcgcatcgatgacgctcaggctcttgttccgcagattgactccctccggaagaaaatcactcacataatccgctgcctcagcggcaaggtcgacgtgttgaacggattcgtgaagcgctgccaatcccccgataagaaccctgttttccctgaccgtgatctacttctatatctcggcgatgtccaggaccatctaatcacgacgttgtcgacacttgggcacatcgatgagatcatcggtcggtcccaggcgaattatttagcccagatgagcgctacaaatctccggttgagtctgactattaactctggtttgagtaaggtcactcttctggctacgatcttcgtgccgtgccacctggtcacgggcttgtggggaatgaacgttcctgtcccgggacagcatgctagtgggctagggtggttttttggtatcctcggttcttttgcggcattcatggtcatttgcatcgccgcggctacgaagtacaaacttttgtagacgttgaccgatggatacatttggcttaggatattttagtgctaagagacaatgtattgaatatttttgctcattccttctctaattctaggcctcgtttttcaaaataaatcaatggaagttattcacaggtattgcaaagctttcgtagcccgaatggcgacatatcgatgctgatcaacaccgatattcaacggtcggagccacggcattgacttagtcccaccatcgttgatcatcaattcaatgccatagattcaacagtgggcacttccggcttctgcgccgggtgtgccgtcagctacacacttctgagcaggcatttcttcctagtattttgtggcgctgcttggaggctgtgtggtggagtcggaatcggtcgtcggcccaagttcgtagctgaaccagagttcggtggtcttgatggtcttgtatatacagcatcaacaaattctagacaggcgaagggggagaagaagagttcgctacgccggtcaagatctcggctgatagggcaggcgctctcttcaaacaggaaagatcagcatgaactttgttatacacaccatcaactgtcattattaccctctgcattccgtactcgatagctgcttttcttttggcttgcctattggtctcttcggtatcttgcatattccgtgtacatcattcgtgcataatgtactccgtactgatccgaggatacctgatagggtcttacctctgggtacgtgcagggccgacgattgcgtaatgtggcaggcgagttagtttgttagttatcggtgtcaaccagtgagtcagattcgaaaaacaccagtgggtccgacgatggcagattgtggcaatagctagtgacacagccacaacagcaagtacctgtggggcggaaactccacaaaccaacgagaggcgcagcagaccaacagctgtacatccatgtatcgagagatacggagtatgtgttgtactccgtaggacagtcggacatgggtggagccgttctgaaaatacttaatgactagtggtcaatgaagcacgacagcgcatacatccaacgcacattgtacattgatgtactccgtgctccgtagagtgtacagaaagcgccctaaggtgtgacgagcacccgaggagaataagcgaaaacaagacctcagtaccaataataagagcacccaaatacggggcttgatggtcgatcccgacaataattcaccaatgatgttgagattcgtggatagcgcgtcattgctggattaaattggtccaattggtccaatacagagtaacccctgcagcattcaggattgacatcatgctagggatagtatagtatagggtgacgaaagacaacgcgaggctaggaatgtttgcataggttaacggttgtcaaacattccttgaaagagtaatcaggatctgcagggctgagataaaaggacggaaaaaggtgtggcgttggagaatcatcacgccaagctgccaaggccataagtctggccccttgagaagtcaactgtcgacttcactcttcgctctttcctattttcacctactcctactatcttatcatcatcaaaggcttgttgccttctttcatctaactttttttctctgaaatacatgcgtaagtagtttcccagaggaggctcaaagctatagctgtagctatagctaccccgagatcttgtctccactcctatgtatctggctaacgatgttcccttttgcagaccggattcactcgtgggcgaaagctcacgcgtcttcaagcggcctgccagaccagtctccctccgaacaggccgccgaccctgttaattccgaaaaaccttctcaacatggacaagtgaatgtacctgtggaggaccccactccggggtccgtcacggaaaccaacaccaaaccgggtcttttgatccgtatgcgaaacgggtccggccgtttctatcaccatactgcggatgctatctgccacagctggattaatgtcttgctgatatttgtaccggtcggcattgcctgtgaggccgcgggtctcaacccagccctcatcttcgcggtgaatgcagtagccatcattcccctggctggactgctcagtcatgccacggagagtgtcgccagccgacttggtgacaccatcggagctctgatcaatgtcacttttggaaatgcagtcgagttgatcatcttcatcatcgctttggtcaagaatgagattcgcatcgttcaagcttctcttctcggctcgattctcgctaacctgctcttaatcatgggcatggcttttctcgctggtggccttcgcttccgagaacagatttacaacagtactgtcactcagatgagtgcttgtctgctcagtttgagtgtggtcagtctcctgctgcccactgctttccacgcctcatggtcggatagcaataatgccgatcgcgagacactcaaagtcagccgtggtaccagtgtcgttctgctgttggtgtatattctctacatcattttccaactcagaacacactcgtatctctacgccagtatccctcaggccattattgacgaggaatccaaacctggtgttttggcagaatttatgaacagctcttcggattcgtcatctagctccagtgatgagtcggatgacactacaacttcctggaccaccgccaaacggatcaaaagagcaatgaagtatcgcagacaccgaaagtcaagtacaagctcgaaagggacaatctctcataattccttccagaagagggctatggcatcgacttccaatgagaatcacggttccatctccaattcaattggtagcaatgaacacgccattgagctcagtgatgagattcgttacgatgccgacgacgacatcctgccctcttcggcagtccgttctcgcgactttggtttggctctgagccgcatggacagcaaagcgagtaagaagtcgaagaaacgagatcacaagaggcgcgagacccagaaagcagagaagaaggctcagatcgaggcctccgaacacagcggtccctccgatcaacgtccggtcctcaagggattcccatccgcccctaacgttgttggcttggaaagcgtggatgatccccggaaacgccggtctcctttcggacctattccgtctctgctttccaacactgttttcagctcccagtcacccgcgggctcaccccgtatgggggccacttcctcgcggccaggaatttgtcgcagcaactcgctccccgcacataccagtcgtcctccgctggccggaaacgcagtacagttcgcccgtggcgcttctcgtctaaccgagcataatgatatcgtgggtccggagatagcttctcaggccccggaacccacaatgtcacgtaccgctgctgttgtcatgctcctgctgtccactgctttggtggccgtttgtgctgagttcttggttgacgctattcccgatatgatcgctagctcaaacgtcagcgaagctttcattggtctcattatcctgcccattgtcggcaatgcagctgaacatgttactgccgtcagtgttgcgactaagaataagatggacctgtcaattggtgtatctgtcggtagtagtattcaaattggtaagattccatccgttttgatgatgtttctacgtgtgcacattctgactatgccaacagctattttcgtcacacccctggtcgtcatcctgggctggtgtatggacaaggacatgtctctgtacttcacgcttttcgagacaatttgtctctttgtaaccaccttcgttgtcaatttccttgtactggacggccgaagcaactacttagagggtgtcctcttgattgcagcctatattatcattgcgtgagtttatccctgtcctcggtctcgcttcaatgtgctaaacatttcttcagcctatctgcgttcttctacccgcctagtacgaaatcaagtgttatcgcaggctgatgagcatatttatgaacccgcgctgatgggatctcgagcgtgggttggttgcgccgtcaaaggtctgtccgctgattgatcgcctttgatcgccagcgctagagcgccattgataaatacacgcctttaattccactctttcctcgaacgatatgttattactggtatgcaagtcggtagtagtgcacgtagtgtgagcaggaataatataatcgatgtatatccccaagatctcgtattgctggctgggaatcttctataattaactgctctagcaacgcgcgttggatgaatcacgggaaatgctccatccgtggccgatcatcgcggtgctcgtagagcccctggctgcctgctattatgcgacctgagtgctttagttactcaacagaacgacgaaagacagttcggcatttccctcggtcccactgatcagcctacaagaatcgaaagagtatcacttagactttggccttaggaaacggctcatttatttccaagcccctgacgatctcaggctatgacaatattcacactatcctgtgcgtagcttaggacaatgcatatccgctggctcttcttccgctctacggcctactaggataagcacttttctgcctctcccacgcgggcaatgcccacttcaccatatactgggacctgaggagttggtccgcctgggtcgttccgcaggttcaaacgtcatcatagctctgaggaagtcctccaacgcacgtagttcaccacctgcaacgtcccattgacacgtctgctccgtctcgccacggcccatgtcccaaagtcgctgacgcagaggccggaagacgggagtgctgatacggcggaagttagcgacccatgacccatccttctcgaagagttcggaacgattcgcccaagagtctcaccatctcatgggcggttggtccagcgtattgaccatttcggcgataatgtcatctcggtcccaggcaaatgtttcgaagagtacgcgctcgcctaagagttcatacaagttaacaccaagtgtccatatatcagctgcggtgggttgaatgatgggttcattaaataaatcttctggtggagagtagagagatggggtatggagagttggtgagggagtctgtgccacaataaaggacgtcccgtagtccgagatgatgatttccgggtcatccaactcgttggcaggcatgctcaaagccatgggatagatggcatagggtggtgcgtggggttcaccacgctttccacccagtcgtatgataggagcctcgtggttgtaccaaaacgcttgtatagctcagatgtggttaggccgtcgaagttcggtatgcgtaagagaaaattgcgcaaatgaagatctgcttgtaattagtatgcgggatcagtaagccgggatgcacaacctaatgacccccacctccgtggaatatgccgtttgcatacaattgagacaaccctaagaggagctgggcggcagcagatctagcagcgtccggcggaaacatgaatttgggctgtcctccttgggattagcaacattggcaccagcaggctctccgaccaagcaccgatgatgtccatttggaccatgaaacgagaattgacctagtagcgatggagtgaatcgctttccagaatgagcgaggtcgctcttcatcgggaagtggttatctggcgatgctcttgcagtcagtatctttagggatacatagcgctggcgttggtgatcgcgggcgagccaaatcgttgaatatccaccaaaaccaagcttgtggacgacggtgtaacggccactacacaaggtgtctccgatgagagttgggtggtatccgccgggtacatagtcctcggaattttcaacatctgcctcaggatggtatatatcttccacttgtatatatgaggagtcagtcatagcatgaaggcatcgaaatgggtgcggtgacggagggactctgttacgacggctggtctttggtgtgaatggaaaccggcacgggaagatatcctgattttgtcggcgaattatcgcgaattatcgcgaattggaagaatggacgagggagtctccagccatggttcaatttaatcttcatgtctttgccgggatcatcgagtcgacgcgctggcagtactgaaagatggtgtgtgactgaggcctatctccaccagccacgtgtgtgacagtcagtggctgtgttttccacagctcggttgtccgagccacaagccacatcgtggcttggcagtagcacacgacatattgattttaccgcaatccttaatggcccccctatagaggggaactctccactgcgggtgatattttccctggacttattattatttggttgtatacggagtatggagcacggagtacatcgttatggacccctttttatacgaattatccaaaggccgaaccgtggaaataaatagtcaagctcccgagtggagcaaagtcgctcctgatctgtaaagcaacccctctactccgtactccgtgctctgtacggagtatgtatatacggcttattgtgacacgctaacattggataggggtcacttggcatgctgaaatcgaatcggtcatttggctgagccctgcaaggcgatggagttgtcaatctggcctgtcagctccaggggctcgtgctgcactttatatcgcatctgcctaatcggagtagacgtgaacttgggcgctaacatgtaactcctagaagtgggggcatcattctagtgttggacagatttgtggagttgtctctttcggttctgggcggaaggtgatggtctacaacagttcgcgctctttcccataaaagccctgctcgctcccccatttctaagttatcctcattttctcttccctccttcatctctctatcaccattcattatgtcgtacgctccaccttacggcgatccttatgctcgccctccctcagatcgcccaccatacgacccctacgggcgcccaccttctgatccctatgcgcgccctcctcaagatccatataaccgtcccccctacgacgctggtcgcccagcatacgaccgaggcccatacagtgcacccccgcctcaagcccgtccccctccaggccccccgcctcccctgccccagggctgggtccaggaatgggagcccagtactcgtcgcgcattctatgtagagcaggctactggtcgctcccagtgggaggcgccttaccagcagcctgcctactctggttacaatgatggttctcgcagtgttcctcctccccagccccaaggaggctactatgcgcctccccagggccctccacctgtgtcttacgatgatcgtagcgctggctactatcagcagcccgagcctgagaagaagagcagcaatgctggcaagtatctcgcagctggtgctgctggtttggctgtcggcggtatcggtggtgctttgattgcacacgagcttggtatgtgatctctctgtttgggttgaatggcttgtttttgcgcatgctaattttttatttttttagacgaggactcggatagatcagatcgcgaagatgcttacgagcagggccgtcgagatgaagaagaagaggctcatgagtcagacgatggcggttggtgattgtgttcacccatgggctgttgcttgaaggtctttcatcggtccatcgtttttctaagattcacaatcttttttgctgggattgaggcttgcattttgcgaaggtttacatcattaggttgctatcacttagcattgcatcgagatatttctctactatcattttttgaaaatgcgaaccacctttaaaggcaacaattgttccatctttacttccaacacaatatctccccatgcaacaacccaaaccaggcatcttcatcttccacaaactgtctccatccccttgcaataacttccaaatcctctgactctgcgaagccctcctcgacaacattcttcgcaaacccagaagatctagccctttcctcctccatagatccaccccaatacaccctctccccgtcactcccaaaacaccaagcccccgcactcttcttcactctttccttgtcaaacccagcctcccgtgcccaaacatgaatcatcctcccgggatgtggatgaccacctttagaaatttgcatgcgctcggtaatctcgcgccacttagcgatccccgcagactcgggataccagctcagctctgccgactcacgacatgcaacaatgccgccgtccttaacgacccgcctcatttcctttagcgcatgaactggatcagcgatatgttgcagaacctgatgggcatgtaccacgtcgaatgtattatcctcgaatggcaggtcgtggatgttcccctcttggaaggtaatgttggacacgccttcggcttgcgcaagggcacgagcgccttctagtggatcaggtacgtactccacacctatgacatgtccggatgggacctgttttgccagggaaattgtgattgagccaggtccacagcctacatccaggattttcatgtctggctttaggtgtggcaggaggtatggcgcggagttgaagactgtgcgccagctgtgcgtgcggaggaccgagactgaatggtctgttgtgtagacttgagacatattcgatgggttgtggagttgtatttgtgattgtaattgttggttttgttgaaagagcgttgttgggtgaggtcggcagtggattttatagttgcgggaatctagacctgcttcggagttccgtaatgatcttcaatatcagtggccatgccttttaaggttaattcaacaccttcaacttggagcattcaattgtttcttgtaaataactcgtgaatgataagagtctaaaccatgagatcaagtactaggcaacaagaacctgactttagcgtcacacagtaagtgcttgagatacacaaacaatgcgtgtttttcgaaaccacatacccaaaagaatgcaaagtgacctgtgtacatagttactgttaagcgttaactaagaggtgcccagcatgacttcatagcttggcatttagtgcggaactccgaaaaccttgccggaattccgaactctcctgggattccatttcatcttcaatatggacgaatcagatagatacgagccattaatccctgcttcacctcgatttctccgcactgcgcgaagaaaggcatgccgaaaatgtgtgggagctaaaactgcctgtgatctcggaaaaccgaaatgcaagcgatgcagagatcgaggcacgagttgtgaatatccaacacacgtcaaatcaagaagtgctgctagtgcagagaatcaacacgccactgtgaatgtctgccctctcagtaccatttcttatgcaatatctccggattccacattgccagagggtttggtcagaagcactgggaatatatctcacgccccgagttaccccattacggataatggaccaattcgtccagataccactgctggcctggacttccatcaaattgatctagttcccatgaccgatgcagaggaaattcgcgatcgctggttacgcccctacatctcgagttcgacgggccaagaacccaagcagttgaatgctcacaccatacagtatctcacctgcgtgttgaaatcgtatcttagaaatctacttaactcaaaggcaccgccttttgttcattcgatgcagcagatggggacttgtccgcctgtcttggcttattgcttcaccctggttcggacatggttgactcggattcctgggtgtgaacctttgattttgaggacgatgcgggaagagatgaggaatattgaaaaccaagtatgttggcaccttattattcgttgcatatctgcctaatattacacaggatgccattcgaagtgactttgatagcctatgctcgttccaggcgtatctcatctactccatgacaatccatttcttcccccgcccagacaccgtcgaagaacccaacaacttcgatacccaaacgcagataaaattacaagaaattgctttccggtccgccaaagcaggtctcacctgcagagcagaagaatctcagacccggccgagctgggagtcatggatagtcgcctctgccaaacgtcgtaccctctttactatgtatctttttaccaacgtctacaatacccagattgggctgccaaacttcgttgctgaagaattgagagggattatggccccggaaagcaaaatactctgggaagcttcagatcgtgccgtctgggaaagagaatacaatcgccacttgtctcgctgggaggatacgatgctcgagatatcagagctgtggaggtctgctgatactggaacagacgcccggcgggagagaattgagcggtggctgcaatctgctgatgagtttgggatgatgttattttctgtttgtgcacatatccatggttgctagtcacatatttctgtgggcctaatttgagagagagcaaggatactagataccgaataaatttagatcaaaaccttgcagttgcttggttgcattgctctgtcacaatatacataaatcgaatcgaaatgtccaaatcacttcacttcttcgacatactggccatctgctcatctgcagaatccagaacagccttgatgggctcctttgagatcatgcgctcaagccactgcttctcgtttgggaactcatcaacgtcgaacccttcatcaacgagtactgtatgtgccgccttttgccaaggaatgaacgctatatcagcgtatgacatcttgttgccaaccaaccagggaccatccccaacatgcttgtcgttggcctccttctgcttgcccaaccacttgtcaagcacacccgtcacacgtttcgcttcttcaacatagcgcttcactgcgctagggagcctctccgcgtggtatctcttgaaccaataagcttgtccgtagtacggcccttgaccagagacttggaggtggagaaacgagcgtgcaagctcggcttctgcgctgcccggtgtaaagctgagcttgcggggttcgttggtgtcgtagcgctctatgaggtattcaataatagcgccactctcccagatggtcaggttggtgtttgggtcatggatcgaaggtaggcgcccatttggattgatcgcttcgtactcgggttccttgacttgagcgaagccgactggaacggattcaaatggtacttcgaggagcgtgaggatgattcccactttgaggggatttgggccaagaatgccaccatagagctgaatgggtttgattgtgggtgacatgttgtgattcaactgtgattgaagctagaattgataattgtgatcatatttacagtgacgggtttccattttatatgtcccaggggttacgttcaatttacttcttctcagtcattctttgtgattcctattatcaatcgctgtggatagttaacctgttggatttgtaacattgtccttagagttcgtccgttgtttgtccgatcttcaaaccgcgtctgaatattaagtaatcttcggactcgggcaacttttaagtccgaagaccgcaccttcggactttcgttattccgttgccggattactcaccagtgggccttccaaccttggaaggttcccccggggccgaggtcccgagatcccgagatccaaccatggattgtaatgaagtcaaagtcgatcactctatgaacatcctcgccatgaagcgtcatgctacccgaaatctgatatatacttgcatcacccatacgactattttgttaattcaatcttgaccaagatcactatcatgaacgcaatcctataggctacggaccatctccttaaatacacatccgcactcagaagcgaagtgcggccacggtaggggcagagatcgcgattgtaatacttcgggtcttatgtctccttggaatttgcagtggctgggtagtaactgatggtgaaggcgaaggagtgtacggagtagacgaggtgctcttcatgtctcattcctgagggcacacaatgccgagaccacaaccccgcactcgtgacatgaggttcatatagagatgcctccgcacttttcattttttctccttgtccatgtccatgtccatcccctaaaatcaatctctctattacacatagctaaatagcatcaaatattcttctaccatcaaatcgatcaaacatcagattagtcaaactctcccgaaacctcttgccgactcttgcgaggagctaatgtgcacatgctggcagccccaatcccatatctaccgaatgtgtaccaattccggtctgtttcatacttttcctaccactattgggtattaaaccccgacgacgacaagttcccacattctcgcaaatgtgcgggtgtcgatcgttgtttgcctctagatacccaaagcaatggcgacctttacggcatgttgacagtttgaaacctgtctacgtgataatgaggtctcctacattcagatacataggtctcgaacacatcaagcagtatatattctcaatgtaaatatcatagccaaatccaattcatcatttaggtacatgccacaaagttgttgccgctggcaccggtgtgagtaatgacaccagctagcttgtcggcgctgttgaagataacacggtccgcaccaggagagctaccagtatagaccttgccactgctaagaatggggaactcgtagtaggttcctgaaacgggaaagctgaagccttcatagttgtggtactcgtgagggtagctggacacagcatcattggcgctgtagagtttgtatcccgctgcctgggcggcactgatggcactgctggtgtagcagactgtgccgcaagtcgcggcacatgcgcgagcttccacatccaacggggcagcgaaggcactggatatgaagacggaggccaaagccaggagctgaaagttgtgttaatagctgatggttgatgctattgatctggaagagggtattaccttggtgtattgcattttggcgatgtggttggataggaaatttgagtgctcggctggctatgaatatttctggagttgtagaccttcaatgtttctgggaaaggtgatggtttaaatatgccttgtcggaagtctttccgcattgtgaagagagtctactcgctatcaatgcgatgttacattctgtgtatccagccgtcttggtcttaattggcaatcgtatactgcaggtccaaatgatcaattgacaacaaccataccgaatgaggtacatccaccgagcggtgaccatgaagtatagaggtcaaaccgaggtactagatagtcccgattggtcgattggggacagcgtgaagaatcgagtggtgctaggacttccggagtcctgaagatacgccctatccgggcaggtgatcgacgggcggggactatgtgggatggagtctcttccttagacccatgcgcctgagatgaacagggtctctctatcgggccaatcatggcggcaaccgtcggacacgatgttgatctaatggtccattactcagccggccatgtggggatagacatattgctgtcggcatttgaacattgagtgagaaacagtggactgcatgcatctagctgtgaacaaaatccaagccctttgcttgtcgagataaggtatttcactcaattgcgcttcgtatatattgttttcccctcatgtgtccccgtgttccgacggtctccgtgctgatcgcttgaattgtcatatctggcccgctgggtgccaactaggcatgttttgtttcttgcttttctgttgtcaatcgcacaaggccacattcggcagttaccctttacacggtggattagatgcaaatgtgtcatatgctagtctgcatataaccgaagggtagcttcagattgtgtatggatgggtatagtataagataaagggtgactggtctaccctataacaacggaatatatgcgagaccaccacttggcaacctttttggatgactcgggctcttccgaatcgacgagctcccttcgccccgtccagatgtccatatcctccagtcggacgacacgggttttattccagaacttgtacacaaccacaaacaatacaaacacagggagcaggatatagttgatcacaaagtccgtcgagctaaagggattgaggaagcaggtgtacccctgaaagaaaacgaggaaaacatttgctgccagcgcaaggtaggttccccatgggtaaaagagagcctggtatgggagctttgatgggtcttggccttgcgcgaccagggcttttcgaaatcgaatatgcgcaactccgattaccgaccaaataataaaggtagcaactatacttcgtcagcagggaacaatggtgggaacgggcaaggaaggcaaacataccccccgaaagggttatcaatgccgagtagactctcccagcactagaggactgttccaaaaacacaatgcatgcgaagacgttggtgaaaactaagccaacccatggaactccgagacgatttgtccggccaatgaattttggcgcttttccattgcgagacatgaaaagcagcgttctagatgccacataaagcgagctatttccagcagaaatgacactaatcacaatgagagcattaatgaggtgggcagctgggaggatcccagcatcctgtaacgagattgtcaagggggagctggctgtcttcgacgttgtgcccaacaaccttttgtcattccatgggatgagcattccaatgaagaagatggtacctagatatagttcagtaatgcttcggtcttctgttttatgtgaactcaccaacgtagaaaatcaggatacgccaaaagacctgcctgatagccttaggcactgcttttcgaggattcgtcgattctccagcagtgacaccaaccctaatttgactgtcagctttcgccattttctatcatcttcgatattggggaatatacatttcagtcccagcatacaacgccattgattgaatctgcgaatgcccccggggcacgccaatattcaaatccaatggcgcgcggtccaatgccacctgcgctgatgataattgcgagaatgaaaaagacaatcaacgccaacaccttgatactgtattgcattagtcagtttcatgcttcaaacgtaagcacgcggaaacgtacagagatagccaaaattccatctccccataggccaaaattcccagatttgacagggtaaggaacatcacccagaagatcaagatccagccccattgaggaacagcatctgtccagtacccaattactagcgatatggcgttatattcatttgcaaggacctagagtgtcatgttagtaagggatgatccataatactcgaattcccaatgtatgccgtacagttacccataagtaccaatatgcccatcccagagcaaacgcaagagagtcgtcaataaagcgctccgcatactcggtgaacgatccagtcacggggagtagcgtggccatctcacccagcgattgcctgtagccattagaatcattcttagggcaaggaaatacaccccttacatgacgaagaagacgataatgcccaccagcgagaaactaatcaaagcccctgcgggtccaccctcatgtagtgcattgcccgagctcaccagcagaccaggaccgataatgcctgagaatactttagtcaacaccaactacgtaaaacaatgtgcaagcccacctccaatagcgatcatctgtagatgcctagacttaagctgccgcttcaatggtgcagacataggatctgttgcaatctcttcatccgatcggtttatctccgatcggaagcctttcgtagtgccatcctgaacaggtcctctgtatgttatggcgctgacatccgttttgtccgtcatattgaggaattgcatacaaataaagagaagatattgaatcagtcaaaacacagagactaaacttttttatttttttacgcaaacacccctagacatgcgcccatgtcaaggaatgtcgtgataaggcacgggagcggcgtcatgggtgatcttgtggggcgatttaggcgggggaagttacaactaaaatggccacatttgaacactaggtgaatccagtaaatgcataggggttaattggccgatccattgacgaaacgaaattccagcagtttcagcatcaaaaacagccttgtcgctaggttcaatcgagtcatctgtgctttgaatagagatctcatggctgcggtcggcgatatttgccatggagaatctctgtagcgatagattttctccaaagaaatccctcatgatccacggagggtatgtagggggttgaagggatgtaagtttgtccggatggcagttgtccggctggttgagtataatacggagttgaggttggagtgtagtctgttgaggttggtgtgtaggctgttgaacttggattgtagtacactgaggtcgggatgtagcctattggacttggagtgaaggctcttggagtccgagtgtgggttgtttagattggatcatagatatttgtgattgtagaaatagggactggaggtgaacgaagcctggctggggttatacaataacaaattgatggataatctgggaacaatgatggtgaggtatcttccatgatcacctcaaaaatcgtgaaaataccaagggttcctttgactttgaggagcaatgatttcaaatgcttggagttgatgcaagtctgatggagatggagctctttgagccgattgaattcgatttcgctagacagctcttcaagagaatagtcttgcgagagcgcaagtctttctaggtggggagcaacatggataagcagagtgatctaggttgtactcatgacataagctggctttatgattctgaaagctatgcaaacgtagaggtcctctaaatcacccagaacggattgaacagagctgtattgctcttctgtggggaggatttcgggggcaattttaccacagcaatcaggattacatgtctgtaactttgtgattttccgattggttccactgagcgtctgcaaaagccttgacgaggctaaagagataatcttgtccattacgcttccgctaccatgaagcggctcgaggttcttactgccgaatcggaagtcgacttgattaaagaggcggcgccagccaagaaatcggactttttcttgtcgcgggtcgagcaaaaagctcgtcgtgtaatgtgcaagtccaaccgtgtgaaggttgtcgaacctttccaagcatttacgtagccgagtgctaaaggcctccaattctagaagactagaattgtctgtaatcaagactttatacgttgaaaaacgagcctttagttcgtcattgaataccgagcgacaactcttcgatgacacggcgaattcggaaatagaactttcactttctgcatgggagccatcgaacacggatggaatcatcgacaactcttgaaatcattctcaaataccatctgtttcggcgagtgcttctagttctttaaggctatcgcttgtcgcaatgaagcaaatgctcttgagatattgaatggaaaatccttcgagggatattctgtgaagtgcgcgacatgagaatctaagcgctcgccatttagagagctgtagaaagctacagactgtcgacataacttttactatgtgttttggggtgcgcagctcgtttaccgaatacgttataggcctccgtacgaggggaagtaatgactaccggttccctaaaattatgagaacggggaaatttagccaagctgaaaattagcgcagtgccaaatccacacaactcaaattttacccttcttttgaagcgaatgtggtgttagttacaacgaacggattagactgataagtacaatgaaggcaaagtgctcaaaggtgtcccaaacaagtgtagtttggtcatcaaagatggtcagtatgccacttttatcatcattggcattaagcaaatcactgatgggtaatagaagcataggaaggaagttgacagaatggcaaaccatagcagcaaggtaacaacaactcaattcttggtattgaagggccaatgggattgccaggatgaaattcatacaccggacataggaacttcgagtacgaagaacttgggaagggttttgaggatatggaggtatgcatttatttttcttcggggctctctttgtttcaccacaaaggacggattcttgataagggaaggctcggatataaatgaacgtccagtgtgggaatggaagggacaaagggctgggagagctgagctagaaagatggaatgatcttagcaaatgtaattcagtaatatgaaatggggttcaaataggaaagttgcaatcaaatgtaggctcagatatgagggttttcttttcttcagtcctcggctttttcttttttctttttggctgacaagaacagatactacacataagccgaggtgtaggtgtaaacccttttcatcatcgccaaatgaaaacaatggaacatagaaatggacttacaattccattagcaagtgctattttagaaatgagtaggtatatcgagtggcgagatagcaatagcggatctgtaaaggcagccacaatattagtaaaattcattcggtaattgaaacgttcaattaggaaggcttctatcaaataagtgtaggctcagaaatcggggttttttcttcagtcttcgactttttccccttttttttggctgaaaagaacagatactacacataagtcgaggtgtaggtataacccttttcatcatcgccaaatgaaagccacggaacatagaaatggacttacaattccatcggcaggtgccgtttcagaaacgcgcaggtagagaatggcggatctgcgaagaaaatattagtaaaattcgattcaggaatcaaataggcgttcaagtaggaagttttccatcaaatataggctcagataggtattttctttcttcattcctcggcttcttctttttttttttttttgctgaaaagaacagatactacacataagccgaggtgtatgtacaacccttttcatcatcgccgaattgagagctggagagtgtagaaatggactcacaattccatcggcaggtgccgtttcagaaacgagtaggtatatcaagtatcgagatcacaatagcggacctgtaaaggaagcaacaatgttaacaaaattcatccagtaattgaatagacgtccaagtaggaattttttcatcaaatgtaggctcagataggtattttctttcttcattcctcggtatttttttttttggctgataagaacagatactacacataagccgaggtgtaggtataacccttttcatcatcgccaatttgagaaatagggtgaagaaatagacttacaatcccatcggaaaatgctgtttcagaaacgagcaggtatatcgagtatggaaatgacaacgggggctctgctaagaaagcaaaaaagtccaaactggtaggtcagaagctgatccaaggcacgagaacagctattggccgtcatcactgttatattgacggtcaccaagggcaggagactagaagaaacaatctcattagcagatgaaaaatcatgattttgtgaatcaggcaatgggtttcaaacggtgcctcagatatagcagtgagttcatcagacatcagcgcacagaaaaagttttgaatatcatcattgcgccaccgaaagaatatgaaacccatgactaaggcaagaggcaagaaggataatgtgagttgggagggggtgcatacacatagatggagttgggtcaaagcaggtaacttgtaggcactagtcaaatgagatatgagtaaaatataagtcacatagcatctgagggaaaaggcaatgataactgtgtcatcttatttcatcgtcatcatcatcatcattgaaccgagagagagtggacatgaagccatggaaacacgtatcaatcggcgcaacaatagaatgctgtgatggagaggatgtagggggtagcaggagaaaacgtaccaagaacaaggtgatggaaacacaattaatagtcaagaaacacaaagacaaaagcaaccttggagaaacttgcgaacgagtaagcaaggacgtcgacgacgaagcgaggtaaacaagtcacctaggcagcgaggtcattgacacacgaagcaagagatcttgagactcaccaaggtacaccctgcaatggtgtagtgtaaacaagagattacgtgcattggggtcagaaggtcaagtccaagtcatgatgcaatgagaaagagtacaaggatggagtctctgaatttggatgcaataagagagacagagagtggtgtaggaggaaagaaagaaacaagacagaaaaattgagttgaacaatttatactcgtactcaatgctgattggcggtgggcaggaggttctgcctccgatcggacgctgattggttggatttagtgagtctatggtatatgtacacattgctcggatgtgatagatgctgtgaggtgacaggtttaaccctactcgcattaacatagatattggcaccaaacttggtgaacttgtagctaggatagtagtctatatttgtacaaactttcacattgtgaatcgatgcagtgcgcgagataaagctagctacaatttgctcgagcatcggggtttccgggccaggtacctagatctattccaactgctttggcattaccgctttgcgctaccgcctcatcattgcggcgattgactccaagtaatccaaatctcagcaaaagaaggaagcattgcccacgacaacatgaggagtccaaaaggaaacggacaactaggcaaaacgactaccgacgagcaaaatagccatcgacaactaagcgaaggaatacggactcaagccaataggccaatatctcaggaaccgtgggcaagacaagacgacaattcattccctatggtaacggcaagcgaattgctttcgacaaggggttgaaaacactatacatatgtccagcagtcctcgacaatcaacatggatccccgggtcgtttacaacggagggctaatttttcgatgaaagtctcgccccatttcgcactgcccaaagttagcaactgacaataggaaagcaggaaagtccttcgaaccttgtgttggtattgataaagtctcgaagatactcgtacttgctccttcgttcggccgggtccagattcaacgcattgaagatcgcctcggacatttccgtcttgtttgcaggatggaacgggatactaccctttgtcatgaaggtagccgcgccagcaaattcggagagaacgaggacaccgtgacgctcttgctggcatgccacatactcgaaggccacgagattcattccgtcgcgggtagaggtgagaaggcaaacatcggctactgagtacaacgcggtcaattcgtcgaatggaacggagcgatgcatatacagcagcggagtgccctcgggtgtggctggctagttagtacaatcccaacatttgtggcaaggtcttaccatgtttcccgttgatcttcccggcgatagtagacagttcggtttcgagctcctgatattctttcacttcctcgcggcttggaacggcaacttggataagaacgaccttgttttgcagttctggatgatcatcgagaaaagcgtcgaatcctttcaatttttgcgtgaggcctttaatgtggtccagtcggtcgacgccaacaattaccttgacgcctttatagcgttctttcaagtttcgaatgcgctcttgaacctcgggctttttcagggtgtcggtgaacttttcgggatcgatgccgacaatgaacttgtttacacagactagccgatttttgtactgaatttggttgggaatttcggtgcgagcgttgctgtggtggtgttagttgatacttcataagcttgtggagtaagggaattagggctattgctcacaggagactagcacaggtgtcgatgaaattttgtttatattcgtccgtgtggaatccaatcaggtcactggacagcatgccttcgatgagatgctttcgaacagggagattcctccaaaagtctcctgctggaaagggcgtgtggagtgagaagccaatggcacaggttttaccttgccgtttgagtcgatcacggagaagctcgggcagaagcatgagatgataatcatggacccagatcaatgtcccagtatccgctgtctcagcaatcgcatctgcgaataactcgtttacccgcctatatgcttgccacggagtttcgtcgaaaactacacctgattgataatggagaattggccagaggatacgatctggcggtcagcgtggatcgcggtgttagggcacggagcttactcgagaacccgttatagtgctcatgggccagggtactatcgaggaatatgggaacggcattatgttctcccaaactctttttcacatcttcttgatcctttgggtctttaacttcgattcctggccagccaaaccattggaacttggtggacttggtcaacccagatagagaagtgacgaggccaccactcgaaatagaagattgaaaggcaccattaacacgtttcacagacaatggaagacgatttgagacgatgatgagttttcgcttttcgtcggtgattgaacccatcctgttacaacagctggaactttatgtatcttcaacaacaaagaacaagtgatgagtcacagacagaattcggccaaaatgatattcagctttgagttgaaagaagcagaaaccaaagaggaaatctggatttatacatcgccgcagaaatggcaaatggcaaattgcacctttacgtcagtatgaaagaaaatgcttccctctcctctttattatccatatgcctagatctaggccacattggcctcgattacattctacctcaaatattccatttgtctggaatcagctgatttaaaaatggttggttgacgatccttccgggttctatacaagcagagatataaaatcgacaccggtcaatccgctttacttgccacagaaattgtcaacatatagataccgtagcaattctccatctttaatcattagattaattatattgatctatttacaaatttccagagctgcttcttattgcaagatttcgtcatgggcatgtcagagctaacgcctcaaccttgttcagcgatttgcctcttttcgttcgatgaagcaattcagtacagatatatacgaacattcagcaaacacaatcactttgaagcaagttctcaagctagtggtcaaatctaaatccttacaactttgcctcttattattctttttgttgtcttgaagcattggctctctgaggagctccattctcaccagttttcatagcaaagtcccaggatttttggacggattttgcgctctgatccaaatgcgcttttgagcctattaggggttttgccgttctacacgttcggaaccctccgtgactggatggagcttggttgagatatatatagatctcaggcaggctaatctcaaccctttttgatatgttctcactcagctgcagggcgacaggaacgcagtcctataggtgctaggggccatatcccaatctttagttaataccgatgccttaatgagccgtctacttagggagaagatatatagaaaagatacctcaaaatatataagaatacatcttaaaaagactactatagagactaccgtcgagataactagatcgtgtcggttgaggctatttttgtaatagtacggagtaagtcaggtggtttaattcttctgctagtcataattcaggcgtctaggcctaaataacatattgaggcatcagtatttagtaaacacaggggttcggccccttgtgtctatatcactgtgtatgtaataccgttcggaggcgaaatatgagatttatactggcctaagtaaaaacaagtacctatgtagtacgtatatcagaggtagagacagcagagagaagccagtatagccccagaattaaatcaactagaaacaaatacaagaaaagaaaacaccataacgatggtatgaaataaaacaccagtgccgggccaaatgaaaatcccaacgaatatgatcccatccccgctggttatgctacaaacccatccgctgtaaaacaagtacgccgaccaagacccaggcccagaaatgagaacagtggcttaggtaaacctgcgcttagttgggctcggtgtccggaggtgctgctcacgctcacgagagcgctcggtgacaaagtccatcgcccgtgtgttttcgagcatcaggggctgatcgtatttctcgtcgtaagcaactccttgggtttgccgggggtcttgctgcccgtagtatccgaaggaggggttatgctgcagctgtgggtgcatggattggggtggtggtgggtgttgcgcgtagttctgttgctgaagacgttgtctcaatgagcggaatgaccagttgctaaaaacggtgacagtagatatggttgcgaggaagaacagctagtataaaagtcagtaaagatccaaaactgagcgcgcagggaaactcacaatcgccttccagctaatggggtcaatgaaactgttgatgataatagccattgtatgagcggagactttggcgcggccaacctttgctggatcacgattcatacaccgttcccagttctcgcatatagtctccagagccgggacgcgactcgatcgcccgcagtcgttgtcgatatagttttttgtgcagaccgccatgtcggccaagatagtatcagacatttcctgtgcagcttgctcgaactcgcctcgaatggccgacacaaatccgaaaaccacgtagacggccagagagaacagcgataggttgaccaccagttgggcccaccacgacaggatggcggggacattcgggtgtgcctccagcatgctgaagaactcagaccaggatgagactcgcgagcgatcctgttcgaatttctctcccttcccttgcttcgtggctttcaccggcttctcctccctgctgctgggccggtcttggtcgctatcgtcatcgctgtcgactcgtatttgccgacctagttccttgtctctccgtcgtttcttttgtatccggtgcaaggctgcgttggagtggtgggttagccgagggatttcgcctcgccctgggctctgcggattccggccatgaaagttgaatagtgacgaagttcccttccctgacttgtattgctgctcgggcgtgtcctcgttgtctgcatattccggtgacgacatattctcagcgccagatgaaaaatccacatcaaatttccgtggtgtctggaaagcaggttggccgaatttagccttgggtgatagtggtgcgggttgttgtcggggctgtgaaaagaggaagggttgagagtttggttcgcggagcgagggtaacgcttgcttctggggcgattcgaatgcgctgtatgttcctgtaggagtgtcaggggcttgtaattgcagttgtcgtcgttcagaccgggatacgaacgtttcttgtcatgctgcgctccaagctggtagaagggtgaggtcacgtcgccgggggctcgagtttgccactcaaagtccattggactctctcccgttcgtttgtccatctttgtttctcgctgaatatagatccgtagcgggtggatggtgagtgtcaaaagtcgggaagttttttgtttggggtaaacatccagatcccgtagcaaccttggcatcgacactctttatctccgacaaggaccgtacttcatcttcttcgcacatatctttgctttgttttgtggtgtatatacagctttaggaaagagattttaagcagtcgtgcttgagcagacctaatcgaaacattgacatcggcccgtggaatggaccacagatctagagatctacaacgttgatattacaaatgtatagacaagactcaaatccaacatcgaagcaagtatgatcatttgacgcatcgggcgaccagcacccactatgggtattaaacaagatggaaagcatacaagacagacatgagaagccatctactcatccatctgccactggtattccaaagcctcaaaccgactcttcttgttccgcgacgtaaaccagtctttctcaaatccattgccacgatccacgccatcccagcggtgccctggccggatcccatatcgattaggctggaatgagccctgataaagcggccgccccgtaacactggctcccgcatcacgccgggcagtaaggaactccgcagcgggatcattccaccgatcgcgggccctcatatcttcgttcagttcctcgtcctcgatcgtccgtgcaagtggcatggccttgatatcttgtaagttctgtcgtcgctcctcgcgctgctgtcgctgcacatctcccatcagcgcctcgcgcgcctgttcttctttctcgcgcttttcttcttctgcgcgtcgggcttcggcgcgtttcatggccacgttgatgattcggccggatgcgtctcggtagattgtttcttggcttttttgattcactgctgagggatcgcggtactgtgcttcttcggccttgcgccgcttttcttgggctttcaccattgctgcggtttgggcggcggtttggagaccccctcgtactccggactccatgcgccctgcgccgtcgtcttcattttctatcataagcgcatcttcgtcgtcggggtcttggtgggcggcgcgttcagctgctgcatcggctagaattgcgtcggcggcttcttgttcacttccttggccggacgtgggtcctccgattgtcttccagcttgacttctttgcgcggcggaattctgtggttctggcggatgtgtcgaaataaggtctatcctcatcgtcttcttccgtatttcctaatgagcgaatgtctggtggatcatcatcggcaatgatgagaccagagcctgcagtatcgatggctttggtcttcttgcgcttcttctttggccgctcggtggtagggtcagcggtcagatagttctttgccaggtagtcggcgagtgagccaggcataatttcggtatgctgtatgtgaggaatgtgaaatgtagaggtgcaggttgagctcagtgatttaatgatccggaggaacgtttccccgaactgtatgccgcctagcgctaagttaacaaggcgtgaacgtcatttgattatggactcggcaatgcagagtgagacttcgaacttgctcgctgaactaattgagaggcctgtacaatgccacgctccgaagaagcagagtggtgggccaacgcagtctacgaagccatcaaagagattccccggggcaaagtcacttcctacggtcatatcgcacgcctcctcggtgaacgtatggatgcaattatatgcttgttggatatatactaaccatttttctttggtaatagctcagcgcccccgccaggtcggagtctgtctcaaggtgcttccgtcaccggagtctggctcgtatttcaactcgaacactgtgccgtggcagcgagtgattaattctaaaggaatgatttcgcatcggtgcgtttgttctaggctacctattccgaattcttatatcatatcaaactggaccatataatctagacttgaaacgaacttttatacgtgttcacggctgacatctataacagtggacccgggagtgcggagcgtcaggcagaagctctcgcacaagaaggtgtggaggttactacagacagcatgggcgagatgtatgttgatttttctcggtatggatggtttccaagcgagctgtcgagcgagggaacggatgagcagccagagaataacaccccataaagactctcgaaaatcctcatacattggggttttagtgcccttgcgttgcatccgagcgttaacaatgattcaaaaattttacggagattgaatccatacatagcaaatagtcataacttgtctgtctggagcaaatctagaaggacttcccagacgagtgggaagtgggaagggatgatacaggagactaaagacccatcacgaatatgatcaatggaaatagaaagacgagtctatcggggagatatgagatcgaaaagcaccagacacaaaaggttgacagacgtgcagggggaaaggcgaggcataagcatacgagcatctcgaataacaccccatccaaccaactaccagcataggacgaaagaaaagctttgaagaagaacaaagacataaaccaaccagcatcaatccgtaaatggaaagagaaaaaagatcgttaactcacatcatcgccataagggcatgaaaacccaggggatagtcccatctaggctaaggaaagagaacaaagagggaggggatcactaaggtcatcttcatcgctttttgacctcagcagcccagccttcaataccctccccacgagttccagggacaatgcccagatcgatcccatccataccaggcgtgtcctttatccactcatgagctgccataccaccagcgttcgccctcttctccggtgacagatcaagcatgggcaataggagttcgctaatacgcatgctctcctccatggagtagtggtacttttctcgcaggacgtcgggcagggcccagtgacgaagtcggtggatattgcgcagttcacccttgcgattgaaaatttcttgggaccatttgccggacatgcagagtgacttggggaagggacccagtagttcaatgatttgggcgatgtgatcatcgtccttgccatatttggtccctgattgggggtcgaagaggtagtctccagtgatgagttcgaaaacctagacaattagcatgttgttcggcttcggctgtgattgatgatcatgccactcaccatgcatgccatactccacacgtcggtactggcaccccacttagagcccagtatgacttcgggcgagcggtattgacgagtctgaatgtcgttggtgaaatgatgaccgacccaacaagcattgcctaagtctgcaatcttgacagaaataatattgacgtcaagttcttcttccggtgatttgctcgaagagcctttatcgagggaaatgccagacacctcgcgctccagaagatctctgtatgtatattgttagattagatcaagctcttatcaatcagagcaaggcagatgtatgtcatgacgtacgcagttttctctcgctggttctgctgcacatcttcttccttcaccccaagcagttctctcatggagggcgtttctgctgtagatgctaggtcagtttcttttctcgcgcgcggtcgagccatgggtgcatcaagggggactgacctgcaggctcattgaccatctggctgaggctactgtgtgagttggaagagctatgtttgaagtcgaagttattgaagttggtgttgagcggactagggagcggctggctccctgtgatcagtgtgcgtcgccgtctccgcccgttccggttatcctctttctctttggcatctttattggcttcttccttgacatgcgccttgacgatctgctccacatctccaatctcgatcaggacattctccggcttcagatccgtgtggatgattccacactcgcggtggagatagtccaagcccagcagtacttgctttgcaatctgcttgactagcggcatgggaataccgcgatggttccaccgcttgatcaaacccaagaggttctcgcccaggacttcaaaaaccatacaaacatggataccgttgggtcccttgtgttcaaacgagtccagcagactgaccacatgcttccgaccagggtgagagggtttcgcttgaactattttgttgaggagcttgatttcgtcgatcgcggtttcggtgtagtgtgcggcggatcgaaccaccttcagcgcgacatgcttgttggtggttgtgtcccgcgacagccagaccgtcgaaaaatgaccccatccaagcttgcgcacgataatatagcgaccattgttgtatgcttcgcccacagcgacggggtggtatccgcctttgcaataatcttcggagtcctcctcttccgcggtagcctcgagttcttcgccagacgatgaggatgatgatcgcgatgcggatgctttggagtttgactgagcagcgccggttctgatccatgggagattagtaaccctgttcatcagaaatgtttcaagacatacgattctgtagcaccgggcccagggttcgcttcattagtgacgatgggcttcaagtcggtgccctttctcctcttctttccgccgttgccattggcagctgacgcagcaacgtttgccatctgtttgcccttgttgagcatcgccttggtaagatcgactccctccatgatgtggagatttgggaggtcaagctgagaggcggggcacactggcttttggttggttcaagcggaacttagaggcggtggatgttggaggggggggcgcctctaccacctgcacacacagtaaagacacggtaatcaaatattgcagaggaaaagttcaaataaactgggtaggaataatttgaggaggggaaagaagatgtcaaagattggaaaattgcgggtaaaggcaaaggccaaagagaatatgggccagagcgacgatccgatcgcaaaagtcaagttttataagatcaagagaaagatagatcacttcggagaaaaggggagtgttgagatcgatgggatggtattccgcaagcagccacagcgtcgtggtggcaaatatggacgcattgagtatagacaataaatagccttataagaatatcctggatgcatgtaaatgtgaagaaaagagaagtctcagcgctaatgctttgactagtagaaacatagcaagtagcaagtacagcatacgcgtacatgtcagaggagatacattctgtgatgctgactttgttcacttggttatatactgtagatgttttaggtctttcctgctacatccaccttactctacctatcctatccttgactacattcttattcattattctattgaatttcaatcagatagaaagaaaaaaagaaaaaagaaaaagaaaagatcgactgcagtcttgatgtgacgatccccgcttggggtaactagctacctgacttgacctcggtggattcacctcttgaactcttactactctgagccgttcctttggcttctctgtcaccatgacaagtcccttcaaccgccgccctattcacgactacttcatcgcctctcctctggtggccctactctatccagtacaccagatattgctccgtctgcgtggccctcctcgactccctccgcctggcactcaaccaatccgagtagtctgcatttccgatactcacaccctcgaatggccagacgtacctgacggagaccttctcatccacgccggagacctctgcaacaacggttccgcacgcgatatccaagcctctgttgactggctccggagccttccccacccatacaaaatcgtcatcggagggaaccatgacagctacttcgacgtgcggtcacgtctggatgaggatcgtaaagacccagcttccatgggggattccttcgcggcaatctcttcctcgacggcatccattcgctcgttccacgagctgaacgacgactcccgcatcgactggggtgacatacactacctccaacactcagccgtgaccctctcgttcgccgacacctctgcgccctcgcccaccgcccccagtactagctcccgctcgcgctctctcacaatctacggcgccccccaagtcccagccatcgtccccttcggccccgaacacgccttcacataccccccacaccacgacgcctggtccggcaccatccccccagagacagacatcctcgtcacccacaccccaccccaatctcatctcgacctttcccccatattttccaccggctgtcccaacctgctggcggaatcatggcgtgtccgtcctgccctccacgtcttcggtcacgtccatgaatctgccggccaggaacctatcttctgggatgaggcccaacgcgcctgggaaagattgtgtgcctcgcgccgctcgcgtgcacgctttagccgcatgtcttcgctcgctggcttcctccgcgatctcttcgatctatctgcctgggtggatgccgcgcgggtcgtgggatacgggatctcaggtgtggtttgggctcacatctggggtggggagaaccttcatggtgggtggatggtcaacgctgcttgcatgtatcgtgacagtggccggctaggtaacccgccgagggttttttccctgtgatcttccatcggtaagcatagcgttcgctttttggttcctgttcataataccatgttggttggcttgcgcttggtgaactgccactgtaaataaagctgagcggtttacctacgccacaaaaggcgtctcttttcggctattcgcatcttcagcctgagcaactccaaggttggttctcaagatccaccttgtatttcacgttacaaaaatgataattgtataatatatatattggcggttctgatcttggtagcaatagtaacctagttcatgggatcaacagaacctcattgagcttctagttaatgtcagaggggcaatcatagtataaaggcatatatgtattcaaaaaggtatacataccctatatatacggaaaggaagaaaagaaagcaataaatcaaaggcaaatgtagatgtagatggaaatatacgtctccggtttttcaggtgatactgaggctccttctacaaagtaagaaaccttgaattcccacgtgttggtatgtcaacttcaaaatatatctccgtagtcttggcatcaatcatttaagttctacaagccaaagagatatttgaccaaaaagaataatttgtacatattgcatgggtatagagatatatatggactcaatggttatatgcccagacgataccaccctgtagaccgacgcgaacaactcagcaagcttcaacacaaacaaaaatgaactacaatgcagcaaagaggattacagcttcggcttctcattaaacctcggcacctgcaatggatcatatgcactaaggccaagggtatcagacggcacaaccccggagtgcccacccaacaacccgcgagtatcaagcagactaggactgagatccgccacagtcggagctccaatcaaccgcatgttcatctccatctcatccttcagcagctgcatagcacggttcacaccatcaagcccataagcagacatggcatacaggaacggccgcccaataccaatacccctcgcgcctagagaaagcgctttaaggatatcagttgcgcgacgcacaccgccgtcaacatagacttcaatgcgattttcccagccacgctcgcggagcgcaggcatcacctcggccaaaacctcgatgccggaccgcgcggtctcgagctgtcggccgccgtggttggagagcacgacgccgtcgcagcctgcctcgacggcgcgcaggacgtcctcaacacactgcacgcccttcagcacgatcggcatgcgtgtgatggatttgaaccaggggatatccttccaggagagcccggggtcgatgaaggaggagatggcgcgggcggcgccctgggtgcggtcgatgtcatcgccgccggactggacgttcgagccaggatcggagaatttagaacgcatatctttctcgcggcggccgagttggggcgcgtcgacggtgatgaagaggcccttgcagccgcgctcctcggcatgctcgacaatcttgcgcgtgatttcgcggtctttgttgacgtatagctggagccattgcacttggtcgccttgtttggcgtcaatgatttcgtccaaggagcatgaggctagcgtgggaatcatttgtactacgttgtgttcgtgggcggcttttgtgagcaccacttcgccttctgggtggcccagcttgccgagcgccgtggcagtcacgtagaatgggattgagcattttgtgcccagcattgttgtggtcatgtcgatgtgctcgacatcgactagaattcgcggcctgaaccagattttgtggaaggctgcatggttctcgcgcattgtctggttataggttagcactggggatttcgtgcctgggggtataaatcatcatggtagcttacaatttcatcatctgctccgctagagtagtatgcccacgccgtcttcttcataacttggcgggccaccacctcaaagtccagcaggttgtagcaagcctcgagatggggcatgcgggaaatgcgctcttggcgttcggcttcctccgggtcgaaggctttttcttcctgctcaacggttgccatgtctactgctcccaagtgcttcgacgggtccaggaacttgtccagggtatcgggtgggtggattggttcgaactcttcggtcgcatctttgcctgcatacttgaggatgatcttctggccaccagggtgttctgagaaatattagtacacattcgaggagggaaacgtagtaaagaaacacacacccgggaggaattcggttacgtcgtaggctttgccgtgcacaatgatccagcacgagtctttggagttgtgctcggcgacaacggcgccggtgagcttgcctgcgctcatattgaaaaggataagagagtatattgttcgctgaagagtagaagagaggaagtaatgaaagggaaaaagatctagtggaccctcgggataaatgagtccgggggagaaattgcggggagcctctcggccgacttgtcggatgagactcgcctcgtcggatgagaactcaaatgctccttaggtccgtatattaatcgaattgaatgtacggagtattcctaagatcaagcccaaaatccaaaggatctaagggattggtgggggatcgttgtcggagcctcggtctgggtcatttcctctatattggattcagccagtagtacggaacgtattacatgctcggatgttcccttcacaaacagtatttcccaatgctgtttttgttgtgctatacatgctgcattcagaaaagaaacaaccttacctatagattcgctgttgacagccctacattcccttgttggaatgttggggtcggggaaagaatagttcatggcctgaggcagcaggactcacatgactcaatcacatgactcgtcacgtgacttccatcatcagaatacaaaatgtgtatcataatgccattgtgttgaagtgcagtttttaaggcttttatcatcatcataagcttaattcaacgggtaatgtacgctgacaattggacagcaacgttcagattataaatagtggagatcattggacggacgaacagcgagcctatgtacctcggtcttggctgatagcgccaccgtcgatcagctactaagcttctttaaaacctggtttctagcttgaagttcaaagagactacctacaatcaatatacggagtaacgctggtcaagtttgcaacgcgcgtgaggcgcacatatcaatttgtgatctgcatcggtgcagatccataatcgggcaagttcggtcattcctcgcacctccggatatcctccaccctcccacacctccgccatttctccatcttcggctacagtgggtggccacagcccctccttgctgcgtcgcggatgccactgctgacgttgtacggggaaggggctccgcctagtgcactgtccacgagttgtaccatgtgtatgtggcgcataatcgttcaattcgtccatgtatatcgaattgggctaaagcggtcgccaccaatgcttgtagttcaatcgaacggtatagtactgtaggaatcatataaatgaatatttggatcacctagctgaaaaataacatggcaataataaagatcaaccaaccacggaggattcatctactggtcggcttcgccgacagcatatcagaggcgctgaaatcacgactcaagacccccaatgaagcgggtctataatgtgctccgttcctatggatatgcactgtgatatcggattttcatacccaatcaacctcttatcggttgaggtctgttgaggagtcttgatggactgcgatgtaagctaaagatggatctacaaagagtacaagatggggattagccccttcttgaattgtggcgtgaacacgcggacctgccatggagaggcatattctctactatcgtacgcttcaacggtcaagagttttgcattcacgtgcgggaacataaggaaccatcaacgccttatcttcattttctggttgcctttctttttcgtccgtatccacttagttgcagttcgagaaaacttcgaatacgctaggaagtggttcaacgacatcattgcggatactagacgatacttttccgccgaaggcatgcacggagtactctttgagggggattgatggattatcccccatcttttaaagacatgactcgagtcgtcatttgaatggttggaaaaaaaatgaaaagatttataagttttcatacaattcatgtgtcatcgttttacttcaagtggaaaagaggcaacattcaagggaggaaaaaaagccgttgctcacatgattctgcaaactgtatgactccacatgttgttttcggatccgagtagaaaattgtataatatgttcagccttatattgtattacttgtagccaagataggaatcccgaaagaacggagaatgaaaagcattggatagaatattaaacgatctcaataatcaatcctattctgtagagcaaggaggatggcttgtgcacattctatatcaagtaaacaaatatgtcaatccctgtccgatccttttagtgcggcgctagtcctttcgcggcccccgataacatttctttccgacctccttcgggatggggacggcttcccgattcccgatttgcaaccggcgccgataacacttggactccgagtcgcatttgagatcgagtacaacgtctaggtacactgttatttggtagggaccttagcaagcgcacatagcatattcccttgtgcgcaatttggtatcggcaaagccgtcaaccaatttaagcctatggttggtagggcctgtcattcaccttaccgctccaggtacagtccatttgaacatgacgcagaattcatgtatgtcagtctacgggcccaagcatcataccgaagaatatatccacccttctcggaacaccaatcacgttgagaaacattaccgtcgaaaaaataagacaaaaagaaaagaaatagtcaatctgatgtcatcagggacgcaagctacgaagtggatcctaaaagaatgcttaacacgccattagtgatgcattcggcaaataggctccgctctctaacagctctgattcgtcgaaccacatttcctacggtagtggcttttgatattttgctttattttattttcttttctccccaaaggtctcggactcaactcgtatggagtagacacgggggagaaaaaaaaatattatatgccccacgatgaatttccttgccacttttgtcaaactccattgaagaagcagacattcaaatatctcccggtttcctccaggatttactcatttctccacgtatctctatatctccagctattccactcactccactcatacccacgtgtttacactgggaactagtccttcatcacttggacctgggtattaagctatactgttattttctctttctattcttcatcatggcgccgagctatgccggcatgtccggtaagcctctgagtttgacggtgtcgaccatcgctactatgggcttcctgcttttcggttacgatcgtgagtatacattgacttctgatacgaattcaacgttgctaacagtctacagagggtgtcatgtccggcattattgattgcgatgccttcggcaggttcatgcctatcacccggggcgactccaccatgcaggccttggtgactgctgtctacgagttgggctgtctggctggtgccatgtatgccttgttcgctggtgacaagtttggccgtcgtctcatggttatccaaggtggttatatcatgatcattggtgttatcattcaaatctgtgctatcaagggccatggagctactgcccagttctttgtcggccgtatcgtcactggcattggcaacggaataaatacttcgactatcccgacctaccaagccgagtgctcgcattccgccaaccgtggtcttctcatctgtattgagggtggtatcatcgctgttggtacaatgatcgcctactggattgactttggtgcctcctacggcccggatgacctcgtctggcgtttccctattggcttccagattttcttcggtattatcattgtcgttggcatgtactatatgcccgagtcacctcgctacctcatttccaagggcaaaatacaggagggtgagtatgtgctcgctgctctcaatggtcacgaaatcgaatcccacgagacccagatccagaagaagctcgttatcgagtccattgaagctgccggtgttgctgccggtgctggttactccgatctcctcactggtggtaagacccagcacctgcgccgtatgcttatcggttcttcgtgtcaaatcgcccaacagctatctggttgcaatgctgtgatttactacctacctgtcctcttgaagaagtccctcggccagactgagttcatgtccatgcttatcggtggtattaatatgatcgtctacgccatcttcgccacgttctcctggttcttcatcgagaggattggtcgccgcaagctcttcatcggcggtatgacaggtcagatggtttctatgatcatcgtcttcgcttgtttgatccccgaccagaccgaagcttccaaaggtgctgtctttggtctgttcctctatatgtccttcttcggtgcctcgattctgcccctcccctggttgtaccccgccgagatctcgcctctccgtacccgtaccaaggccaatgctgtctcgacctgctcaaactggctgttcaacttcactgttgttatgatcaccccggttatgcttgagcgtatttcctggggtacctacctgttctttgccgtaatgaacttcatcttcatcccccccatgattctcttctaccccgagacagctggccgcagtctggaggagattgatctcatctttgccaagggttactgcgagaacatgagctatgtcaaggctgccaaacagctgcctaagctcaccaatgaggagattgaggccaaggctgctgagtatggctttgagtctgaccgccgccgcggcgataccgagaatggcggcgaaaagggctcccctcgaagcacctccagcgatggcaagcaacttttcgaggaggaagagaacgccactaccatctcttgagagctaggctttctgtcaactccgctaagcggttatgtttcaagtttccggcatgacagcgctgtgcgctgacacctatcaacgttatggctgtgctgttccctctgtccaatggacgggtgaacgccagattcgcgttttgcttttatttcttatttctttacatcttataccccttgtttctggtctcttgggtgatcctgtctgcactttgagtgcagtattgctttttgataatgacccccgaaaatggttcggtcgggcatgggaattgttcagcttcatgtacatgcatgggcttttgcatgatactagtctagcggacgaacacatcacatttactcttttcccatgtaaattgtaaaacctgtatcccatggccctgcatatgacaccttgtagcctgccgctctagggttgagtttatagtgactcatgcgggtgctgccttgcatgaggctgatagaccccagagcaaggggaccattcatattccttgcaattaaaaaactataatgacgagtataatctcctcggaaaagagagccaatcaataagccatgcgaaatacatcctgttatagaacccgatgcagccctttatccgcctgtaaatgtcttaaatcccatgttaccaaccactgcatgtaagataaagtagttgagttgatagaagctgactcttttttgcctttctattttttgcctattcttctatccaagacacgtgcaggtgacctcgtgaacaagagagaagccatcggctgataccgcccccaacttttcttttctttcttttcacattcaaatatctctttgatctgatcgctttctttcgtgttgtggtcaaagaatttgacttctgccaacatataatgcgaatacaaaactttgacccccgcttcctcaacctcggggaaacatgagttcaagcctcgaagctaagatcgttgtgctcggcgcacagggtatgttggctgtgaattacccagttctaaatctcataatcactttactaaccttatctcaactaggagttggaaagactgccctcgtggacaggtactgtaaaaacacattcaaccccgccgcggcttcaaccatcggcgcgtcgttcgtgacgaagcgcgtcctcgattccacctccgacacaatagtcagattacagatatgggacacagctggacaggagaggtttcgcagcatgtcgagactttattatagaggagctcaagcagtgctcctgtgctatgatgtcagtgcatccacttccacaccgtttcccctcttcattcatcctgcgattgtatttgttgcctatacataggcaacctacaacgtgatacaacccacataaacatgaatactaacttgcacagatcaccgaccaaaacagcttccaagaaatggccggctggctgcgcgaactccgcaagaacatcacacccaacgacgatggcacagactccctcataatacatgtcgtaggtacaaagtctgaccttgtcgcggacgacccctcctcccgccgcgttcccttcgaacgcacaatcgcctacgtcgctgaacaactctacccatcccaagcctccaccccgccaccaaccgcaacagcaggcatgggcgggctaggctttggaacatctgtttttggaggcagtggctgcagtacatcgaacgctagtgccggccctgcagcacactcgtccactgccctgcagagtccggactcgaaacgcagttcagcattctggggacaggagattgggtgggattgctgtcatgagatcagtgcacgggatggcgagggaattgatgaggttttccgcgttatcacgcgtaagctggttgagcagcgcaaccggcgggatactgagctggctttgtcgattgctggtacgcccttggcgaatggggtcgttgggccctttaatcctggggttgtggagggcacgggcagtttccgccttggtcatggtgataagcggaggagttggatggggttggcacctggtgtcaatgtcgagggcgccggcgaggagcgcgttatgcatgcatcgcgcaacaaggggcgatgttgttgatcattggctaggatggggggttggattgctttttctttttgcatttgagccagcgtcgttttgtgtttgattattcatggatgcatgggttagaatagtgtagttagggcttggattggttgggtggccttgtttttttgtccgctatgcgtgaatgaagatacttttcgtttggtcaataagaaacgatattctacgccacatgcactcatcatgtactttttatatcacttgaatctcgaagcatgggcagtggagacggtggatccgatcgagatgtcccactgagtccactatgtttatctttttataactatgttgtatggacatcctctggcggatgtttctaccatatcaccaatagccaacaagatcatacagttcaatacggcgataaaccggatttgggctcacttacgtcgaaccccctcatctcgcttatatcggagaatttcctctgccattggtcaaagtatcatggggccaatcaaagagagactgtgctttgctatcagaaagaacctgtcgatttcattccagtccatgtctgtgtcacatcttggccaaggaagtatctcttttgtcaactgcatccctttgctgggcatttctggtctcctttcttattccctccaagctttttgttgaatatcaaaaggtcgatctatctctttatcacattcatcttgttccaaagcagacccggtgctcgtattcaacccctcagccccgtatatcctgaatcccacctcatttatcatgtcgggggtggaggtgatcgcggtcgtagcttgtgtggcagccagtaagaccatctcctctcctatcacaataaacgagattaacaagcctgatcggcaaacagtcgtctccgcctacagcgatggagcgattatgtttactgccataaagaagaaataccgcgagcgcaaatccactcagaaactagaacgctcgctcgaaaggtcgctcgaacggtcgctcgaacgcggccatgctgatattaaatctcagttcaaccagtaccgtcaagagcttggctggcgatatgaggaaggtgacgcgatcgcccgagagcagatgaaagatatcatcatcgaactacagggggcgttgctgaggcatctccgcgaggtacaggaccgggggaccactctagatctcatggcgttgcagacagagtccgaccggggccgcattaatactttgcttattttgagccgtttataccagcggctctcgaggccgtcgcctgttccgccgtcttttccgctgcccatcgacccgacctatcgtataatggcttctcatggccatgaatatccccttcatggccaggacagatattcactatcccattcctcggagacggggtacatctccggctatcccgtctcaccagccagtcatttaccaggccagttcctaccggacgtcgtccccgcctccccgacggatacgctggggccatcgagggaatatgaggctatgaatctaggaaatcgcctacatccatcgggccttggatttgctgtgagtagtatgggcgacttgttccatccccgcccaggtcgtacatcgtcgttgccagtgtcatcgcccgagcccatgtacatcccacaacctgtgggatccaacccagagtcaccgtcgatgttggggcggattccgcaagttgatatcagaccagccacgccgcacagacccaaaccgcgaccaagttcgataccccacgatgtcttgtgggggaacccgtcggagcacgaaagcctcacagactcaaccccatcaaattcctccacccgaagcagcaccgacggatcaacccaggcaatccgacccctctggccacccagcgaaacgaacaactacctgggcttctgcaaaggggcgtggaaggtgcacgtgggattacgaggattcaaaatctactcggagcctgcggggtattacacacaacagtcatggttgcggtgcacaaagtgtgctttcgaagcacccatggccccgaagagttctagcagcaacccgcaattcgagaaaagcgtgcgtacacataaagccagcggtattcggtatcgattcgagttcttggcgaaatcccacgtgccctgtaagcgggacccggcatcagattttacccctaataccccccgcggcacgttttgttgcgtcttttgctgtgcgctggcacaaagctccacacgggtctatgggaaccttgatatcttcatggcgcatctggcggaacagcattggacggttgagaagggagcgttggctgttttgtctagtatgcggtgtgtggtaggtcgagttgcgcctgattcggagtatttcgatgtgaatattgtgccggtgcgcggctgatgtcttggatattattgatcctgttgttttattttggggatgtcttaggtttggactggaagggtgtcttggtcatacccgttctttttgtgtatgtgatgtatagcgtttgaagaatggatttcaggagtgtacatggatagcctgaccaggtacgaagtagtactcggtagatttccagggtctaagtaatctttcacggttgcacagtatgtatatcgtactccgtacccctgaatacgtaaataactcgaaaatcaaaaataaaaccaaaaggaaataaaataaaataaaataaactcaaaagataggccgagatctttcgatttcgccaatcagaacgaccccaatggcccaaaatggcccaaaatggatcaaaccaggaaccgacacagttcggtctgcccaaataaggaaagcgccaccttcccttttctgctttttccctttaccttttttttttcttaccaggtctcttggagaaaggacctcctcctctggattctaacttattcgactaattccatattccttctcgaagtactacttcatcccttgactcggcactttcgtcatctcgcgctcagagtacgcgagtgagtttgataggcctccacatgggtcgacgcttattacgttcctaagattgcgcgttccgacaccttggccttttgccatcttcctcctttcacattcaccccctataccacttccctcgatccccacaatcgcgttatgcgatgaggttgtcacttcgtgttagtgccgctgccgcactaattatcctgactctcgtcctggtctgtcgcaatctgaagaccaaaggcgaatcactccaggatatatggcacttcgataccggctccttccgtacatccctcagaccaaaaccccagcctgatccatcacaacggaaatggcgggttgcatcggacagaaaacccgcgttggtctaccagaccaccgatatcgtggtccccaaccagggtgctattgtgatggccaagcttaaggaggaagacaccgcttgggtcggggcagaactagcagagtgagtgtgactcgattgtattcccagaacaagaccctaactgaatatctccagatggcgcagcgtcatttacaccgtcgacgatatcaatgccccgacgcacaccccgaaaaacaagggtcgcgaggctctcccctacctcaaatatctggtcgaccactacgacgaccttccagacatcgtggtcttcctgcatagccaccgcgacggcctactcgccggctggcacatcgacaccatggattacagcaatgtggactcggtgcgggcattgcagaaagaattcgtgcaacaggcaggctatgtcaatctccgttgccaattgagcccaggatgcccctcggccatccaaccattccgtcaacccccgaatcccgaaagcaaaggcgaggcacactacgctgctgcgtggaaagagctgttccctggggaaccggttcccaaggaagtcgccggcccatgctgctctcagtttgcggtttcccgagagcagattctccagcgccctcatagcgattaccagcgcatgtatgactgggtgatgaacaacgaactgccggacgacgttaccgcggcaattatggagtactcatggcacatcattttcggcaaagatcctgtcttgtaagttatcctgcaattgtattatttgtattttccccgctaacacgtttaattgcagctgtcccgatttgttccaatgctacgcagatgtctacggcgaagaagtcatctttacctaaatactgctcatttctaatcattcttcttttgcctacaagggccgatagctctcttgtatttcaaccaatacgtttcttcattacccggcacttgccggaactccccagcggagaaataccatggttactgggaagacacagtgccaatgccatatgatgacttgcttcgatgtctattttttttattctatcggaagcaaatgtacaaagaccgaaatgtgccgggatggctatcagagtgatatcatctgtctcacctcgagttgcacgtccaactcaagcgcatgagataattcctttcgtgctacggcacccatgtatatcttattgatgcaaattttattccagttcaatcagtaaccgggtacctaccgcgtagctatgcctttttctcctgtacaaccatcttcctcgctacttcatcccaccggtacatccccccactaccgacattataatgataataattatttgtcccgctaggaacaacagcccgccgaaaggtaatgttaatccgtcccttggtcgcctccacggccttccccttccgcttaggaatactatgcaaccaattcgactgcgtcgttccacgcataacaaccatatcccctgacccaaggctcattttaatctgctgcagtggcaccgcagcagcaggcctagacccaggagaagagacggctttcaacgttccacccgaaaccgtacaactcgcccgcgtcgcactagtaccgcccggcccggaaattgcgtgtgcagcaataggcacgcatccacccgtcgtccggtttgcattccctgctggtactgaaggcttaggcttcattagaaaatcccgctcgccgcccagcgacagcgaggcgatatttgggtctggtccgaggaagcgctcatcgtcggagtggaaggcgatactgtcgtctccgctgaaatagtaatttaccaggcagaaattgtagccgggtgtttcatctgcgtttgcatttacgtttgctgcttcgacctgtctccgtaggagatctagacatgctgggattggccgcggcgtgcactggtattttgttttcggagttggcgttctggtctttgtttctagtagaacgaggctgtttgggtcgttgtcttgttcttggatgaaggtcgatgtttcatcgacgccgaagactgttgtccatcgtggtgtgttgatttgcgtttcaatgtcgccgcgtcgtgctgtgtattgcacacggtagaagggaagttcgcgacggaggaatttgaatagctcgtttgctgttgggcgggggatatagggctggaagtggaggaggtcgaggtgtggttgattatttatttcccggggtggctttgctggtgttgcatgccctaggcctacttcaatgtgggagggaagttgagctattggaattggataacttgggtgttggcttgggggtttggtgtcctcgactgggatattgtctgtctcgggtgttgagattgcggttgcggtgttagattcgatgaggtcggttttcgcacgttttggagcggtggttgatggtttgaagaatgcatcgagcgtgcgttttgccattgtggaatgggaagatcttgggtattggcaattggaattgaggcagttgcgcgcgacttggagaatttctcgggtgatgtcattttcgatcccgatctatgcattccgatctggcttggcacatattttgtagcatcattgtcatggcattctagagtaactccgaatcgctttctcgggctataggctatataattactgctgaactccgtcagtctcggcaatcttgaccaagtatttcaccgcagatgccttgccagcctctagatctttcaatgcgccttcgataccacccagtccaccttttcgcacttcgtatgggtggcctgagaaccaaccctgtgccagacctcgaccaatgaattggaagaaagcagctccgaactccttatcaccaacagtctggccttcggcaggatgcatatgaacagccccgaccatagtccgctcgatgctaatttgcttcggcaccttatcagcgtccgcaggtaaaacgacagtgatcttcccaggtacatcgagagcagcaccgagagtcacatagcttcccttctcggacacggcatcgtaagcatactgaatgggatcacccttgccagcagccttgatcgccgagtagacggcgtcatcgccttcacgataatcaataatcgtgtctcccttctctctgctgatcaacgtctcgacgaagggagcgcctttgccagcgatagcgatgatggggtgaatgttcgatagctgagcgaacttgatagcaaatgcgccaactgccgaggcaccgccatacacaactagcggaataggtttatcggcgggagcccaaggtagaggaaatttcagtttctgatataggcccaatgcagcagtcatcgccgcgagggggattgtagcagcctctggtcaataagtttagttacatccgcgtgatgactaggacggagacatgtcataccttcaaagctggtcttctcggtgagatggaatgtcgtgtgttcccacgcaatggcatattcggcataacttccatttggggtcatcatctcgtggaacgctgccactttatctcccgcgcggaagttctggactcctgctcccactgcttccacataccctgcaatatcgtctccctggttaatagtattgtttggttgccatttggggactttccagtccttcgggttggtacccgacactactacccggatgaggacctggccgggtttgggagtggggatctcaacgtcgcggatgacgaccgaagtggtgtcgtcaacaatagcttctttcattttgaactttgggaatcgacggtggaaatcaacagatcaaatcaaatagatcaagccgataatttatattcgattgatttgtaatgtcacgggaatatataaatgaacttattcccggcgcttccacggatttataatcagataccttagttttagataactagttgactagttagttagttaggtacatagatatattacctaaatctccttagtctgatattgaggaatagtctcccctgctcgccacttgtatttgcttccagtatgatcttcaggcaaacgttgcgatccaatgaacacctcgcgagccgtggcaccttctttctcaatttcctctcggaacagccctctccgtcttagttcaggcaataagaattcaatgatatcctcgaaagtcccgggattcacaatatgagcaagattgaagccatccacatcggatatttccacccatctttccaactcatctgcaactgtcgtaggactgccgacaaccttggcctgtagtccacccacactgatatactccacgatcctccgtttagtccatggcaagctatccgtgccagggacggtaccagagaatctccgaacaatggactggacccgcggcgagtcgctgaacaggaaatcctcatcatcagaatgacttgacaggtcgattccggtccatccaccgaacaaagcaagcgcaccttcatcgtcggcatattggagatagtcctcgcgctttgcttgtgcttcttcatctgtcgctgcgacaatcacgttgatacccacaatgactttgatatgcttgggatcccggccttgctgtttggcaatattccgtatattatccaccgttaagcgagcaacctcgggagtctgaccaccgatgaagattgcttcaccatgctttccaccgaattgattaccggcctcggacacgccggcctggaacaggaatggcgtacgctgtggcgatggctcacagaaatgagggccaggaacatcaaagtattttcctttgtggtttatctcccgcacaccatcgctggcaatgtataccccgagctgtcggtcggcgagcacggcgtcgtctcggaaacttccttcccagagcttatagagcacctcaagatattcatctgctattgcgtatcgctcgtcgtgaggaatctgctcgttcagtccgtggtttcgggctgcgctgtccagataagatgtgacaatgttccatgccaaacggccttggctgagatggtccacggtagagagtcggcgagcgagggcgtatggtttttcatacgtcacgctggcagtcactccgaaaataaggttctttgtgacagcggacatggcaggaacaagatacaaggggtcattgacgggaaattgtgcgccggatgccaatgcgggcaccacattcctagggcccttgtatacatcgtacgcgcccagcgtatccgcaatgaacattgcatggaaaccggctttgtccagcaattgagctaagtcggtccagaatgagagtgttttgtactgatcggtcttgtttctagggtgcttccatagcccaggtgccaaatggcccggggtgttcatgacgaacgcattgaggatgatctgctttttgccggacgttggtgtgacttcacccattttgagttggaattattcgaacgttcagtggatttgaagaggcacttgaggtctacgcgatgagtctttagcaataggaaccggtttgtatacgtagtgggtagaagcatacgccaagcgctgtcgccatcgcagggtcaccttttatctcccgtaatcggtattcgacatttgtgatgactattttgaatctcatgtcggccgataaattagcctgtgtggggtacgcagtgaccctggttgtgcgcgattccaagtgattttatcgcaatctgggagtcgaggcacgcaatcccaacgacaatccccctcacactcccatatctttcgcaatcaccacatggcgagcttattaactttatttcgttcctccaatggctttgcgtctagactctttagtcgtgtctctaccagtcattctgtatggcgcaattgcgggcaaggacgacgtgagatatctcacccacatggcaactctgattgttgcgcagtccttcagagaacccccaattggctatagatctacagagactaaacttggcattgaggatatggcggaccctccacacaataaatattcctcggccctgcaccttggaacttggctttactatgcccagagatgtctgacatagatacgtccgctttgatcccccagggggcggcctatggcctcctcattggcctcagtgtggtgttttgtgttgttgttttggttgctgtcaagatgcagaaaaagtatctttctgaagattccggaaaatcggaaatgttcatggtcgccaatcgctccgtagggagaggcttgtgtgcatctgcagtcttcagttcctggatgtggatcaacgagacggtgttgtgcgcggctatgacgtatcggtatggtcttgcagtgcctctggtatgtttctttatgccctcaattgactttgcacgactgacgggctatagtggtgggggtctggtctatgcttccaaattgcactgatggcagcactcggtgttatggccaagattcgagtcccttatgctcatacatcgctcgaagtagttcggatgcgctatggcaagattggacatctcgtgtttatcgtgctcaacctcgtcaacaacgttttcggctgcgcctcgatgattatgacgggctctcaactcatccatggtgtatctggaatgcactatgtagctgccactatcctcgttcccctcggaggtttgtttcatctttcttactgaagtccatcgggaaacaggagctaacccctttgtagttgttctctatacagccgtgggcggcttgaaggccacattcctgacggatttcttgcatacggccattgcactcattctgatcatttattttacgatcagtgttttgacaaactcggcgatcggtggtctgggtggtttgtatgataaagttacggcagtagctgcggataattatatccccagcaactaccaaggttcccttcttacattcaagtcgaaggatgcaattatctggggtttaattctcaagtttggaaacctggcacttgtcgttatggtatgtcaattccaaaaagtgatctttgaaagctcccaaggaagacttttcacaatcacgaacttcgccatgttctttccaaagctaacatatcaccggtaggataccgcattttggcaaaagtccttcgcgaccgaggtcaaagcgacagtcccaggatacaatattgccgcattggctgttttcggtatcccctggggtctaggcacagtcgtcggtttggcaacgagggcaatccacaatacaccaatctttccaacataccctggcatcctcactgccactgaagtgagctcgggcatggtgatgccatacaccatcaaagcgctcattggagacaaaggaatcattgcattcttcttcctcttgttcatggctttgacaagtaccgtttcctcctcaatgattgctgtcagtagcatcttgtcatatgacatctataagacatatctcaacccgaaagctaccgacaagcaaattgtgggagtgagccacttgactgtcattatccacggcgtctttatcaccggcatttccatcgctctcaactatggaggagcaaacatgacatggatcgggtacctgagacccatcatctcatgtccaggaattatccccatgattctcactttattctggtctcggcagacccggttagctgcaattgtttctcctgtgcttggcttcgcttcaggtcttgctgtctggttggcagtaacgcactatatgtatggcagtatcaacatcactaccactacaaatccctacccagcactatatgcagccgtcacttccttctttacgccggctctctattccgttgtcctgtcactctacaagccttataaattcgactggagagtgttcctgcgaattgagctcgcagatcaagaagaaatccagtcaccttcagacgcgagcacattgaaccggagcagcgaggaagaccacgcaattgatttgaaacatcccgctggatcagtctcaccggttgtcaatagtcagccagagagcatcaacaacgacccagagaagattactggcgacatcagcgaaaaggtttcgacgaacaaaacttcgtctccatcctccgcacaaattagccttgatgatattcggcacccattcgacgacgaaacattgaaagagctgtacagatggctcaagatcgcttggtacatgttcggggctatcgtgctgatcacgtttgttgcttggcctcttccactgtatcgagactatatcttcacgagatcattctttgcggggtgggtagttgtcgccattatttggcagttcgctgctttcggggcggttgtgattttcccactttatgacgggcggaaggatattgtgatcggcgcgaggggtatctggaagtcttacaaagagcttttcgggaggaacaagaaaaatcaaacgagctaggtagataataggtgctgttaaaatagagcgggaaccagatcggtcttttcaaatagaactcaagtcttcacgacagccttggaacattcttgctttcgtacggatcctcccttgatctcaaagccgtcttccgggagcaccagaatagcccatcctggagcagatgatcctcaacccgagattctctcctacagggccagaaaaccctctgaaagggcctcggattcgtcacttagggtgtggttataactggttcatccgctggggaaggcgctgattacataaaatgtgtccatgtctcgcaaaataggttgcgacttgaaacggggtagtgacaccagcccctgctacaacgatcacctttgagatccttacagagtgcggccttcgtatatttatacgatgcaactacaataaacggtagaaatacgatgcatgcccgcgaggtaaaaagaccaagaaatcgctggtcttaacgtttctcggatgtccaccaacggccctatattcagggaccgggaaatctcaaggggattccaaggggaatagaatgcttaacactggaagcaaaagtggaccctttgtagcaagatgggatttttacagccgcaccgagatgcagaagaagacatggttgaataggaatgttgcccacacaaagtgcatatacaatttgtcagcaacattgaagtcccttgaaaactgtcgtttagttagagagtgacaaagtgaagatcacctaggcatacattgccctaggactgcatatcttcaccaatggggttgtggcgttcttagaggcttaggcggggaggcttaagcagagctacccaatgcactaagccaaatctggtatacaagatgttccttgagcagatgcgattggccaatcttctaatccaagtggagtatccgcaactcttactacaattgtatatcggcatcagggcgcgtggctctgattatcgaaaattaactgcactgcctgatgaagaaaattaggaaaacatcgcgagcggaaatgtatctggaagggttaaatagcagacaagggcccacgattcgagagtaatacaaccatcagttcattttccgtcttcctcttgatcccagtacttcattcccttgtgattatgactatcgattatcggcatgggatttcgatcctagaggtcattgtttactctccatgcctcttcattgctctctggatggcattccaccatggtttcaaaaaaagctccggctggtactttttcaacatcttttgtcttgcccgtgtcattggcgcagcatgctatttggccacgattcgctatccttccaatatcaatctatatattacctgggctgtttgcacttcgcttggactttcaccgttgttattggcttgccttggtcttttatcccgagcgtgagcaaccctcttactcgtgattaacttgatgatttgcagctaacgacatttattagaaatgattccattatgcgaaagaccgccaatcctctccacccgttgatcttccgggttgttgcaacattttcactagtcggtgtgattctgagcattgtcggcacaacccagaattccgatattacccatggccttgtcacaatagagtcgaagattggcctcatattctaccttattacctggttctgtgtgttcgggctgttctttctgatcttgaaacgaacggaaagtattgaggatggagaacgtcgcctcctcttggctgtgggaatctccgtccccttgatcctcgtgcgattagtctactcttacatctttgcctttggtggagatgcagacttcaatctgctgtccggaaatgtcacgattcagcttgtgatgtgtgttttagaggaaattctcgttgttcttgtgtgcctgggcatcggccttacacttgaagtacgacccgctgctgaatacacacagcaacccagtacccacagcggagaagaaaatctgatggagctcgagagtggtcacctgccaggccaagcgcgtccaaatagacgagtccaaagacccaagcgtcggggtggacccattacaaaactcgtgatgtatattgtggatgaggtcaaggaccggaagcgatgaatgattgcatcgatcaagatcatggggttagaattggggattgggtttgaatggacttgtttactttgacacttataaggtagcatagattgactagctactagaactatttctacgccgtgtagaattataattaatacccttgttatgaagactccctctaattcttttgctcaaaatccatctctctgattgccatgcaattgccaaacttactaattattctcattgtttattgaagatgctgaagatgagaatgtgtgacgtcaaccatcagtgtcacgtaactaagcagcctgaacgtaaacggaaaaacatctcgactctctccacaagccttcattctccaatggatcacaacacaggtctccccttgttcattgcccaggagactctctgcttttatccaatcagtacaatctacaactcatgtccacgatatctcttctatgcgcttctgctagcaacctgtgtcactcgatggacaggatgggtcatggatgtatttttaggaactgcagcggcatatgcagggaccgcggcaattcaagccttcatcatggtttccagttaccagacaccccaagaccctggacctgtcactatcccatacctgtccgctaactccagcctacaaaacactttctcttctttgatcaccgagacagaccatgttatgatctcgcccgcatcacttgagcttgactcggatgctgttcttgcaatcgttgtcaccggttatctcgtctttttacccctccaatgctggtcccgcatcctaacccacgaccgagcacggaaccttctcttttatatctggcacgcgctcatgttgggtggctctatatgttccctcatctatgccgcgaaagtacccaaaatatccccacagtacatgttctgctttcctgatctcgtgcctttcaatgacacatcgaatgacggatggcaagcctcatggagaacatccacgtggaacgacagtgtgtgggatatattttcgaacctcgcgcgatggaatcaactaggagatatttgcttcaacccctgtttcaattcgacccaaattttacgaaaaccagactcattgcattcagccacggcagacggagacttcaaaattgctacctcccatagcttcgtgaagaaggttctgtactcgcatcgctacatctacagtctcatcattatttgtctgatcctgaactgcctcctcttgacttatcgatttctaccttatcgatcgcggatcccatcagcgcagatcatggtaatctggaaagaacggaagactatctggaaaagcttcaaagacgaagtttgcggtgcgatggatacaccaagcaatctagataataatggagaagacccgggacccacaaccaagaagacctctgtctggcgccgaatgcgacacatattcagccgtcagttcctcaaatcctttcttcatgtgcttgttgatgctgcaattctttttggcatactcttcagcatgatagtcagtccgttcaccgtcgttgcctttgtcatttggatagagatccaaatctccaatgatgggccgtcagaggagactccgagtcaggttggtcagtgggcgtaccccgtgtctctagcactgcttgtaatctcagctgcgattctgaagctcaaataccgactagcttcgtcggttgagcttgaacgtgagatttctgcattgaaagagcacctgggagccttggagaaaatgaaggaggcacgatcggggtctgagtcgactgcgctcacagctatgactcgtccggccaaggaaaactaggcctaacgatattgttcacaaaaaggtgcaatagaagagcttaatcataacaatgaatacattcacataattgatcacgagcttcagtgttgatggtgtctgatttgaaggcctcttgcttagtttacatgtctatccctatttcagactgacagtatcaaacttcctgacaacggtaagcacacctaagtataatgcaaggtcctctgagatcagaattataaaattagaacgaataataaatggcacatgtaagttgggaattgcgttatatggtgacctgtatatcccggctaggcgaaggcaggtatccctgattgattctgtagactgtccctccaatgtattccctggtccaggtacggagaacatgatgttataatagcggggaaacgagttatgtcaaggcgatagtcttctttcccgagatgatcgccttggcagtcctgcgggggacgggggaccgtgtcgcatgaaaataggaagaaaccagccaactatccttgttatgtgttatgcgtcacacagcgcggtcagtgcatgagaaatcccgaaaaataagacattcgattcgagaaacttgtccattggtgttatgaatggactcctatttaatattccttgctcccccccctgtcaaggttggtatgcgggtttctttgttctaccattctgtagggtcatacggagtacattacgcagatttaagacaaagggatttccaccttgttatccccttgttgtcccccctgtcattactgcccgcacctatacaatatgaatctcaaagagacaatctccaacaaagagttcagtgagaatgtttgtgttgatagcattcattccggcagaaggacatcacacataccactctggcaatcgttcaagaaatcccccaacatcgtgggctattgcctcgcgctaagctcggcaattcttctctacggatatgatcttgtcatagtggggacagtggctgcaatgcctcaattccagtaaatactccatccaaaataatacagaatttcgtcgctgctgacacacgaaagacttgttttcggccaggaactcaatggaaagtatatcatcccctcgatgtggctttccctttggaacgtctccagttgcattggcttgatgttcggctccatcctcggtggttattatcaagatcgtcgtgggcgtcggattacgcttgctataggcagtttcctatccaccattgcggtcgcaatatgctacatctccgatctaccagacggaataggaagtcgtcgaggggtattcttcgtcggtaaattcttccaggggatttgtattggcattcttctgtgtgttacacagacgtacatgtccgaggtactccctgttgctctacgaggaccggtcattgcattctatccgatcttcacacttcttggacagctggttgggtcgatcgtggtttatacttcgcttaagcatacaggcgcacaatcttaccggatttgctttgcgtcgcaatggccgttctcggccgttccctttgtgctagcggcatttctaccagagtctccaacttggttgttgagaactggacggacagagaaggctcttaaagcacagaaaaagcttgataacgatcatatcgactcacaagctgtaatcgacgagttacaggcgtcaatttcagcagaggacgaggagagcgcaacccatacatatgccgactgtttcaagggagtcaatatgcgccgaactatggttgtggcttttgcaaatatgataccccagatgttcggtttgcagctgttggcaaatgcttcctattttatgcagatcgtgggtatgggttcatcgaatagcttgatattcttgattttgggtattggactgggcctgatttcgaatgttatcagtctatgggcgctgaatgtctttgggagaagacttcttattctactgactctgggtatcgttatggttctatggtttgccattggaatcgcagggatcttcaagggaacagtgacaatttggtaagaccctatattggacgcttaagacgatgagctgacttggttgcaccaggtatacggcagtaagcatgatggctatcgctatggtctctggttttggatcgtggcctgcgtcccatgtggttgccgccgaagcgtcctcgttacaactccgagccaagagccaaggtatcgggtggtttactagtggcgttggcactgcagtatttgccatcatcttgccgtatatctataactcagatcaaggaaatctcagagcgaaaacggggtttgtgatggcaggattcgccgcagtggcagtcgtcggggcatggctggctatccctgaaatgaaaggtcggacgccaatggagattgatcgcatgttctcgttgaggttacggactcgggcattcaaaagctggcagagcgatgtcacacttaggagcgaaacagaagacactcatctgcccgctaattcatgattgttctttctacgcaattgaaggtggaaccgaaagagaccggttcgacgtggagacaaagtcctattactcaactcgagaaccaaatttatattcgttttatctgtctcagattagaccattacctgagctaaatatatagttggatccaatattcttctggtcgatccctcaatttgacctcgtctgccgggccctgtcagcagtctcgcagccgagattcgaaggggacattttcacatatcaatacaattggacagcctgtcgggataaaatgtaccaaaaagaaatattaaaaaatcagagtacacctattcagatgtttttatttttttcacaaaccacagatacccagcgatgcccaccttccaaggttaaagccccggagatcctaatgtatgactaatctgggatagagtgggcaatgcgagtctaaccatcctttctcacttgtcatatcctcgaaactcatgtcggataccccagagaggaataaacctagcaaacgtggaacacggaattccctttcgtgtgcacaatgtcgctacaaacaccttcgctgtgatggccgtaagcctgtctgctcgcgctgcgccacaaatacagtacagtgcgtttatcctctatcacggcgacgtggaaatccaaaatcggcgaaaccccggtcgcctgtcagagatgtctatgataacaccgtcgagacatcactgcaaacctccactgtctgttcttcctcttctaccgctataaacggggaaattgaatcaacttccaactcagctgcttcatttttgagtttatattatgagttctttcacgcggctcatccttgtgccttaccttttcaagttctcaagactcggctcaacgaagcgaatattcagcctttgcttcgagtgatgtcttatatcggatctatttttgatatttcttgtccgtctcaattgctagaatcttgtgctcaacgtgctcaggactcagtggtcgaaattcggtcatcaatccggcctcttacaccatttgacgttcaagctctgttgctttattctatcgctgtctactggtgcaatgaaacagaaagtggtgtggagctccttgacgaagcaattcgcatggcagtagcccttgggatgaacaaatcggaattcgcccgaaaccacgctgaagctgattctgtactagaggaaagttggcgacgaacttggtgggtgatttatatcaccgatgcccatattgccggtatgtcccctaaacatgattatttcccccaatttacattcctgataaccgcaggatctacccatacgtacccgttccgaacaagtggcattgaaatcactaccgaccttccttgtgaagaggaacagtatgaaataggggtaggacaactgctctattgctttttagaagtttgagttgactttcattaggtcatccccaccccacgatccctagatgattacgagaacagggaattccttgacgaagaaaaaagtgatttttcctcctatgcggagcttattggcttgacccgcgggattgatcgggccttgtccccgggcaacagtgcatatgaccaaatatacactacaatggctgctagctgcgacactagtgttcgagcatggtgttctcttctttctcctgaaaagagagaattaattcatcccgatggatcatttgatgaggtcatgttcaaagcattcttcattatgcacacgtacgatctgcacctttcttctctgttgtctatttgcctaaccgaagtctagatacaccgttgaaattcatcggccgctgtcagcgttgactcacagtgcgatcgaatccgtgtcgcgctgtgctccattggccccgtcggcacacctcaaatgcagcaacgcgaaggaacgtgacctgcatactgtcaaatgtacacaggctattaatagcattgatgaactgctgactctgccaactaatatgacaacccattctcctttcatcatttgcatgattgccaatgtgactattgcgcatctttcggcttgcaggttcatcttttctggcgaccggcgagccaaaagccgggagaagattcgtctgacgatgggcactttgaagcgtctaagtgagcactggacactaggcaaacggacctaccgcgagatcgggattatcgcccgagaattgctatctctcacaacggatccctcaattggtttggatgccgttgacctgtcccttccgggtccaacttcacctgcattcccaccattggacacgttgcctgacgccaactttgacatttgtgccttttttgatacggatgctcttggcctaaccgaaacgagttcatttattttacaatagattccatgagggcttaccctccaatgatagccctacagattttgaatcgctgatgtgattatcccgatgctttgacagtgttctatcaatagcttcgatacccagctattctcatttccggtactcctcatcaatttggatgagagcccccataccgtccctctcaaatgcttcagtatcgatgatcatggtagcaatgagcgtcgccggctccgtcttgctagcattatcgctgatgcgatgatgacaccccggcgcttcaaaccaggttccgccttcttcgatgattttcataggatcttcattcattttgttgagaagagtccctttgaggacatacgcgccaacgttcgcgcccccgtgacgatgcgggggagttgacccgttgggtgggaattcgacacgcaggctaacgatagtcttgttcgggatgccgaccagcttgtacgagtaggaaatctcgagcgagggcatcgggcggctgtatgttcaatcaacttccgagtgggaacttggtttggtgctttatttacctggagtcgtaggttggttcctgcatattggaatttgaattttttgatcggaaggatgtctctggttctgatgaagatttactaacccggtggaagttcgtcagtatttatataggagattggtcagatagtatagtctactttccgacgtcacggtaaaggatagactgttcgggtgtccgggagtagctataggctatcaacagatagcctaccgggtaccagaaataaagtacacacgtggttcttcgcacgaaccttggatataccttcatttggcgaatcattctccgtggctattctcgcaagtctcaatttgtgtgctggggataaccgaaatgctggcgccattcccgaccggacaattggtgatatctcacaggttcattatacggtctgcgaaataagcacgcattacgatgcaaagaggcatctttcaatgcttcttacgtgttctgaattgaggaagggccagcaagcactagtaagtgatgatcgttggtcaaggatataatctgcttttgactggagcatacgggtgggttccaacgaagacgacggcatgcgtaaggcctccttttgagcgaagagatttgtcaaagatcgacaacgttggtcgattgctacatgccaaactagaacgtcgcctagtgcgaactagaaaactacaagggtcccctgtccaattcccaattcggcctgtgaaaaataatttcaggggccgcccgtgcattagtcggaggcagccgtcgggtcgaatttctcgacacttcaatattgttttccgggatttggtaaagatgtattgggtttccaaatcccggtctactaatcaggtccctagagccgagtctctcgatgttgtatggtgatccttttggcccttctgaatcccccttcaaacaaagaaatgtacatcacatgaccccttgttcatttgctactctttttcaatcgcatgttttcccttatttcacaaccttggaagacctgattctccgtcaattttattccccaaagtctagtaatgatctctgagaaagagttcttggctcgcctccctcggttcatcagccactggctgggctatcgtgagaatgcaccaaagcctcccccgaaatatctcgttcatttctggtcgttcatagccgcattctgtggtctatgtgtggtacagggtatattcaattactcttcctacttcattgaacgtggcgtgccgggcatcattgcttcttatgtacgtctcgctttttccatgtgcccttgtcagatactgatccataagtagggagcatcagcggttctcgtatatggcgccattgagagccctctagcacaaccacgcgcgctgatcggtggccatttcttgagcgctctggtcggcatctgcatctcgaaactcttcagcttaatgcacaatgaagaaaagttcgactctttgcgctggctggccgcttcgctttcgtctgcggttgccattgttgttatgcaaatcaccgagactacccatcccccggccggcgcgacggctctccttccagcagtggacgaagctgtgtgggcactatcttggtactatctgccagtggtcttactttcatcgactatgattctgatggtcgctttggtcgtgaacaacattcaacgtcgctatcccgttttctggatcagtccacccgccccgaagcctgttcttccacaggctaccaattagaaatacagccatgcgcctttatcacaaggtgactatatagatgtcgagggattgctagggaatgacagtggatattgagacgcaatcccttatgaacaaaggagttgcgcaggaatagacttgccatgtctctttgggtggcaagtgcagtgtcagagttttaggggctcagtatgaccccgtcggatttactatgacctattaaaaagagttgtattcaacatgttgtctatataattaattgtccaaatcacacaatcaaacaagaactgtcacggagtacgtactccgttctccgtaggtttcccgttggttttccgtcggttgtgacactccacaagatcgtcattggcctcgccccgacccgcgttgccgtggcgcacgggttgccaaggcggcccatccatcgatcgccgagggcgggaaccttggaaggtggaaacgcagttcagatctgagatctgtataacgtgcatccatagatatctgtcgccatctgcaacccttatgcaccgtttcagcttcaagggctttatggtcaaatccgatctggctgaaatatgcgtctgttttactcggccgagaacctgaacacaaacacccatgttcacaaatgcgggtaatcacaggccctatgtggagctgagctctagtcgtataatcctttaggtatctacgtacgacataggcagctaggccgagaatactccgtaatataaatgaagctttgcgaatgcgaccccacttatcaaccttagtatagtgtaatattcttaagctatctacgaagtacagtctgttaatggatagtttatatgtatatactctaccatcatataataacgcttgaaaactaagtggtgagatgtatctatgtcggaatatgcatatgcatatgtgaacttgaaaacccggagcaatagcggtaaataaaaaagaccgaagccccgtgtggcaaatttcgtcgctccactaagctttgctggttttttgtctactgcgatcctttgtacaggggtagcctgcataggcccacacttggctccaagctggttctgtggcaagtgggggatggccgtttttctccttccagttcacgtaagggacaatagctgcaacatgacagggtgtatacgaggaatgcgccaatttacaatttgttgttttgcaacttctacatccatggttcaagagtcacggcattgtactttctgtagccaccggtagaattgggaaatgtggctgagtcaggaacacgactactgtttactgtttactgttcactcattatattataggtctacttccatggctaaattctctcagtgtctttgtacatttcatcattatgcaatatcacgccagcctcgcaaatacggtcttggcccgtccgaattcgaatacctagtcggtaatggtctctatattgtcgggatttgaatgattattgcgtcctcgatccatgactcagacattatagatgcaagtgcatgcattggtggaccggagatttcctaaaatacccgtttttagcgatgaggaaaccagcatgatatgcagtaagattttagcttcgggatacaaattggcaggcgatggaatccctcaggaacagccgagagatacatatttctaccccaggtgttatattccatcgttgactcgtgcaatgataatctataatatctatctcagtggtcaatgaagctgaactatctatattgatttcatacgtacccgcgtagcactcaattacaagcgaattgatttagtctgagatagagagcccacattttctgtaacataacggtgatgcacgtcacggtgatccttcttcattccttgtttggacaatcggggggcccgtctgcgagcatctagcctaaatgacgtcctactaagtgatgtatcaatcctttgcgtgcccaatccaggaaggggatataaagtgctcactagattcaagacacttcgtcaagcgagctgtcgatcatgcatatcggacatcagacacgataggtcgtattcatcgttgccaaggaatgtttgcaagatatccactgtgggtagattcagccaagcaaagaatcaacgtggctttgtcgtatccgcttgatatggccatttgagctaattccacccgtcttctcttggtttgaagtaacctcacgcatatggtcctcagtctagaactctccgggcgtccgagaccagccgctctctctcctcttgaaacaggaaaatgtaggcgactgtggggttttggggtgtataaaacgttagttcttccatcgataacttcttgcaacccgggatacatactttgacgagatgtctactatatataacagcaccgaggctccgctcaaccccatgcccatcgattccgcatcgtggcctataggacttgccgctttgaccgaagcaagtacgccagtcctgtggacactcactgcgattgtcggagcttcgcttctcgcctggctcagaaagccctggacagacgaaaatggtcaccaaatccccaagggcccgctagggcttcctatctttggtaaatctaacgctggcatacacaaagggcacgcattaacatgacttacaggttctttttactctttgactagatatcctgagttgactctggactactgggcgaagaagttcggggacctctattctatctggcttggaaaccaactgttcgtcattgtgtctgatccaaacattgccaaagatctcatggttaccaatgggaacgtgttctcttcccgcaaagaaatgtttatcaaaagtcaaactatctttgctggtcgaggcatcactgctactccatacaatgaccgctggtaagtttatcctagacttggctgaagccgctgctgaccctattaaaggcgcaagcaccgccgtattgcggccacatggttgagccagcgtgccgttgactcgtactctgctgtcttagatcgcgagtcgctctccttggtaaaagcattgctcgttgaaagcaaaggaggcttggcccccgtcaaccctcaagtgtgtcaatcccgttcctcaatccccccagcaattactgatttgtgaagcctcatgccggtcgttgttctctaaataacatgactactatcactttcggtttccgagccgacagcatccatcacccgctggtgggacgggccttgaagctcagccgtgaatttatgtatgcgcgcggtcagatatttattcatcttgacaacagactgactaagttactaggaattgcactggccctatgtcgaaccttattgattttgttcctattctgcagtatctcccgtccccattgtacaaacgcgccaagaaactgcacgaaggcttggtcgaaacatacggtggctttatcaaggaaaccgagcagaagatgaaggaaggcaagaaggttccggactgtttagctaagactatggttgaagtccgtctcaaagaggaccttgatgatttggatatggcaatccttgcatcggccttcatgattggcggtgttgagacggtaagttactaccatcatatcactattactatccatcactgacgcctcattcagaccgccgctattatgcaatggttctctgctcttattcctgcctaccctgagatccagaagaaggcccaggaagaactcgatcgtgttgttggccgtaaccgtctccctggcattgaagatgaaaagaatctgccgtattgtcacgctatcatcaaggaagtcgagagagttcataatcctttctggttaggtactccccacgttgccagtgaggattttgtctaccaaggaaagttcattcctaaggatactgtggtcgttctcaacacatggactatgcactatgatccggcccgtcattcttcccccgaaaaattcgatgtatgtcacccatggccagccctttgaaagacctgtttactaataagcgaaaaaaagcccgatcgttatatagacgaccccttgacatctgccgacagtgtcaatgtcgctgatcctatgaagcgagaccactggatgtttggagctgggtaagtactaccttgtatacgacaaaacacaaagcccaactaataccttctagtcgtcgcatttgccctggaatgattgtggctgagcgtgagatttggctgacaatctcccgtatgctgtgggcattcgatatgtacgagattccaggggagcctgtcgatttgaaagaatacgatggcctctctggacgctctccagtgccgttccgtatcggattgaagccacgacatgaaaatgttacgaagctactagagaaagttgagatttaaattatgtgtggcaggcaggatgagtgattaagagactgaagatgactgggatggcgttctcccacgatgagaatgcagatatgtatggaagatcatgaattcagtaccttttttctcttgatatatatacctatacgtaccggattttccctggcgggtggggctttcctatttgagctgccgccgcttttgtgagggtgcttaggctcaggctcactgagtagatatcagcacgggctcagatcagtgatcatgctcagattcatcacgtgcagatgactgatcctcagtatatgctcagtgagtgctcagtgatgctcagtgtccaatcagtgagcaacactgatgccctcagcacgccgcagcacaccgcaggctataccaaaaagggattagccccgcaggtagtttatactgtaatagctaggtctttgataacattgctgctgccctcattttttggagcactacatcccaccaaggaaatacgccatgacaaaggggcgcaggaaagagcggagaactccgtccgtttcaggatattatcgccctctgtcttttaagtgagagcggctcgagcccaaagtcttggatataaaagcaggccgtataccaacattagtatataatttttcacaagccttctatttaagaacctcttacctagtatccttgatatactatccttactttgaatacattctctgcctccaggacacaccgtacttaatcataggtagaaaagacttttttgccaagcgcgatgagattgctaagacaaaacgccgtttacagcgagaaaagaatggctatattcctagagccccacagacaggaggacttaattcgggagaaggacaagaggcttccaagaccaaaagtttacatcataaaactgtaaagctttggctgaagtgagttgggctgcatataaggtggcaattccttcccattcatgaataaggctgaccttcccttagttttactgcagatccagagaatgggtttgaatactacaaaacttcccttggttgtccagctccaagtcatgacatgatcaagcaattcattcgctggtacactagttctattcaaggacgactgaacgaggatgagctacccacggtgagaaccgtgagtgcgcatgccgaacggttttttggtgggtttgaacaattcacaaaatttaaaatcattctagatgaaaggaaataagaacggttaattaattcgtcacttaccgtctgatattatcataagccattctaacctcgaagtagtggataaaaaataccttgacggcagacggcatcgttatagaccaaaagaaagagaagctcaacttcacaaagcaggattttctgataacagtctcgtctttgtggcagacagatcaccaaaaattcattcctggtttgcttaaggtctttgtcttgttcgctcttcagctgtacctcttcactggggcaagagtcggatcttttatacaatatctttgagaacggactctatatgaaaacgggaagcagtatgacttatcgatgtaatatatttgggattctctacctctctgaggtcagctcataaaatgactagttagacggattttgtggtctagtaacagcttgggcaaaaaaatttgctaggaaccctacagtatttcttggtaaatcattacgccacatcatataattgcgcccagtcacaatcagatagccaatagaatatagagaagcgactcaatcggcacagggtttctgcatataggaaaaaccgtggcctgtcgtaggaaaccactcgcctggagaaacgagctgtcttgggatatagaaaaccgtctgtcgtaggaaatcgtccatctggcgaaactaattgtcgtaggatacggaaaactgtggcctgtcgcaggaaccacttatccagagagggcaattatccagggatactgaaaggattgggaaactgtgggccatcccatgatcacctagctagttgggcacttggaaaattgtgctgtgtccatcgggagtcctgctattgcttgagttggaagtcagcgtgcatgtgaaaaagggttggcccgcatcatcgtcaatcgcgcgcgcgtagagaactccaatgattggtcagtgcctttgctcttagtatgtgagtcatcagaggagccttgtagttacatgagcgccatcaataggtctcaccataagcttttttgaccaccacgaaattcgacagggttagaagatcaccagacatgtttaacgttgactgaggaattccttgattttttccaggtaaagtaggcggaacatgtgtagcaattacacatagatcttacatactatgttgaccgatctatgtgttggatgaacttgagttacacccgtgggaagtcctcacatgtgtacttgcatgatcaaaagtttattgattaagaggcagtaaatatgggctgctttcttatacgttatgggaaaatagtctgatttgtggtaacttgtaggtactttaaacgcgtgcggttgcgataacgaagttgatccacgggtcgagcgcctaggatatgtgtggtaaattgcaggatctgcttttgagttagccacacctgttgtataatcagcacgaagagcttcactcacatcaaacacccggttatctcgatgaccatgctctggacagtcgtctcggtcaaacatccggtcgagttcaaggatctacgaaatttcatccccgacctagtagagatgtactatcttggttagcataacaacgcatagcatctggaacaaggaaaccgtactaaaatccttcagtttaacttgccacaccacttctagccgccgcactgcgttcctccggcttcagctttcttaaacgagatgccgtataaacggcagagcgtggaagagtctaataccttctagtacaaaaatgacggttctgtactggcctaagggaggcgagtgtccgtagggacctagcatgcatactggaaagtgcattattgcatacgcacgatccgcagcttgtacaattcttttcgtcatgcctagccgaggccgggtgactattcgtaccacgcgggttgtccgtgcttctagtgtagtttgcaccgtgtccaccgaagctatatagaaattcttataggaagctataagcatgctctgaatccctagtgtggtgcctagagttgtatatactgcctcggccgagccacctactccaccggcactgcaatatcgctataagagccggttcgaagaccgcgcgagggcctattgggaggtgatacgccacgacctgtggtgccacatggtatgcagacacgtcccggcatcctaggcaaatccagcgtaaatacctctaagtagtacctagtagtacctagcggtaggaagacccccggtcgattaaatgatagaatagagcgccggttgcaattgaggtaaggatatagtagactttgaggccgagttagggccaccgtcgaagaatcgtagcgagcgtctaaggtaagattgagacgagactatatccggcctgtgtcatgtgagcctcttcaaataacatataccgcgggaaatataggagcgctgcctttttgcggcccgtttcacatactaggagtggaatgataagggaggttctaagggcagtatgtcgagcaactatgcctacgaaagacccatgaaccatgtaatgtagcatgtaaatacggcctagctaccgatgggtctactagaaggtgcctcgttcgacacggtagacgtgggctagaagatcgaggctaaatccggagtagaggggaacaagatgtgtgactactaagcatcccgctcgcttctgcacgtccgcctagttctgggtatgaaggctgattgtaatgatgttggcaatcactggggttgtaagcactcccccttgcacgtatgccgtgatatctagccactggagcacggttggcgttggcgcctagaagaagcgtctccacgatactacgtgatgcagtcggaagggtaagtggccgaatcggtggccgaagctgtagtagaccaagcatatcattgcgaggagcccacaaagaccaaatttgtctggggtggaagccctagcaagccatttgacaaaatttgacgcaggatgagacatgctttcaggtgaggcaatcctcggcattgtaggattatagtatattttccgaaaggctgaccggaaaacgctgatctagagcttttattttgggcggtcgaaagcactttgatgttgatgctgttcagatcagagacctctttcatggctcatactagagatgaccggttgacaattgcaaacaattgagtcctcagcaggacatcaacgacagcagtaaagaaatcatctcggtgttcagagccaaatggcgaaatataagaaaccacaagtccacgcgaacaactttacggcctgtggaactacattgtttcgtaaccgtacacatacttgatagagagttgggtcgtaggtagtacttaaatatccatggatattgagatcatatagctcgaaggttccacgttgatatcaagatcaaacttggaggattatgacttctatatccccccccccnnnnnnnnnnnnnnnnnnnnnnnnnnnnnnnnnnnnnnnnnnnnnnnnnnnnnnnnnnnnnnnnnnnnnnnnnnnnnnnnnnnnnnnnnnnnnnnnnnnnnnnnnnnnnnnnnnnnnnnnnnnnnnnnnnnnnnnnnnnnnnnnnnnnnnnnnnnnnnnnnnnnnnnnnnnnnnnnnnnnnnnnnnnnnnnnnnnnnnnnnnnnnnnnnnnnnnnnnnnntacccccccccccccccccccaaatatttctcaaaacatcccattaaccctatccccagtctctaaaagaccccttaaggcttctcctccccaatcatcgcaaaccacctagccatataatcaatccccggtttctgatccctcggattccgcggctccggttcaaggaaaccgccatccggaagggggatttttttctttcgagcgatattactcaattcaatagaatacatacgccacccatcccagataacccaaccgagtcgtcgccacggtttcatgttcgtcagcgagtagcatgcaggcactgtccgcgtgagatttataccactgagatagaggtgtgcgatgtgccagtgatgcgaggcacggtgtctcggcgcgagcatccaggcggatgttaactctgtgtcctcgggaggatctggcgtagcccagaggctgatatcttgtgactgtgtgggtggcaggtcaaatgatgggaagaaaggtattgatgtttcttctggagcgggccagatagtttgggcgggttcttctgcttctgggtcattaggcagccagttaagggtcagacctagatctgagaggacggcggatactgtccagagtctttcggctgtgcgatagtcgatttcgctccaggtgttgtatgcgtctagttcccggattgaggattcgttccagttccatcgctggattgctgctttgcgcaggtgggagtagtgatgcagatgccagagagcccagtatgtgcgatactcttctgtccaggtgaagggttggctggcattttggatttggagtgggggtccacttattgaatccgcggggatattatcaagagttttgataagaccttctcgcataatagagagacatttgcacgcaagccgctggatctgcgcgcctatcttaagtatatgccgtgattctgtgtaccctaaagttggcggatcctcgcatgtctggtgatagtgctcaagatccgggcattgcagtgaagagatactgaggtgccagatgttatagcatagcttttgtatttctggcatataagtaatcggatttaagaggatcagctcttgtatgatgcgggtaggctgggcctggaagacggcattgagtcgtcgagatgctaacaggctgtttttaatgcctgcaaaatcaccgatattggcgagaatctgttgaatgacttcagggggcagtttctcgaaagaatccatgttgtaacttctttgagtggtgagagagatatgtagaaggttagattctctacaacgatcgagatctagtcaaatagctaggtgaagcctggcaaaccaggcaacggcatgtgatcggcacgtggccaccacaacaatatctatacgaaaacaatccaagtttataaatcgaaatttcgaccagacaaggtttagtgccgggaagcttaattgtatgatcttgctccttcctcccctcgactcttctctttcttttcctcatcccgccaagtggtgagagagatatgtagaaggttttattctctacaacgatcgagatctagtcaaatagctaggtgaagcctggcaaaccaggcaacggcatgtgatcggcacgtggccaccacaacataactgaagaaacttcgggctgggaaaggtagatgagaaggggggagcttggagatattgaagggttgcacgtgatgggattagcgtgtcgcattttattgatacagcgttcctaatgcttaacgaagacaaccaaattctacttttatagttgggatatatataaagcgcaaaatttacatcgttcaaaaaactcgagttcaatttgcgaactagatagactgctttcactctctcaaattaatgagcgagctatacgcataggagcagctttgaaccaagcaccccaagtagcatactcgactcttggtggaagatccacatcgagagcagagtcccttatgaagctgtggacgtccatcttttcaatcgggatgaaccagcctccacggtcgagcctgggatctttattccacttggtgtaaagaagccagacgacgaaaagtagaatcacaagcggtgcagcaatgtagttcatgaagaatgtttcagcatcctttgaagccacagagacataaaattcggcgatgagacacaagatattgagacccagaccgatatagctcccaaccacaccaaggggagcggcataggcaagctcgttcacgctgtgtccgttatgcgcccaggcggagcggaagcggatatgggcaaggcagatacttccccagatgaagaagtcggagataccagacaaggcaaggagccagtcgaaaatggtgcttcctgatggcgcctcgttgatgaaagcgagcaaaccaaaagcaatctgcaggataatacagtaaaggggccgaccacctttgtcaatatatgccatgaatctcggtgccatgcctcgggaagccaaagactggatagtacggcttgagccatatgtcgcggagttcgccacgctgataactgaaatagtgatgatcgcattcataacagagggcaatccagagataccggcattctggattgatacgacaaatggagaagccttggtgttggcgccagatgctccgagaagccagtcggcgtcagaaggaacaatcaggccaactataaaggtgcccaggacatagaagatcataatgcgccagaagacctgcttggatgccttggggatggacttggcggggtttgccgcctctgcagcagcaaggccagccatttctgtaccaccgaaggcgaaggctgctgtcacaaagaccgaacagaaccctctgaatgttgtgaatgcaccagggtcatgccagtaatgagctcctatgtaacctccgttcggggcgccaccgcaatcgatcacaattccaaggatgatgaagccaatcacagcaatgaccttgatcattcccagcacgaattcgactataggccgacgttagtatttatatatcttgtaaagatataaatgctttttcaccttctccgtagcctcgaactccgaagaactggatcgcagttagaacgactagaaacactgccacccagattccgctgttcaaagtttcactccagtactgaattgtcaaacttgcggccgtaagttcgaagggaagaatgatgagccatccaatagcgtagtcccagccgactgcgaatcccctatcataaaatgaggagtcagtcttttgaccatgaatatagtacatgaacacggaaactcaccaggctgggctaatgaaccggacgcagtatgtgaaaaaggctccgttcacgggatatagcacggccaattcgcccaaggcctgaattgtaagaagaagcattcctccaacgatcaagtagcatagtaacaaagacccaggcccacccgtacggagagcagaccccgtactaacgaaaagaccggctccaatagcgccaccttactgaaattagcatcagaagaaaagtaaaaaccgttcgaggacgcataccaacagcgatcatctgcatatggcggttcttcaggttccgcttcagcgggttgagttcaccgacgctaacatcatcgtgagctgaagggagactttcagctggttccacaatggtgggtgctttcttctcgacgtctgagtccatggcggtcatgttttcgaattttacgccaacgccggcaacaaaacttatccacggcgagtggcaatttatataaaagcccagccgcagataaccgtctgatttgcatcccgcctatgataagaaaggcagtaagcctgatttgctcagctcgtggcgtagtagagagttcgtatacggagtagatgtgatcagactgcaagatgaagataagactttgtgtacttctcacgacccgttgatatggccaatcgtggccaatcaggaggagagcccagagttcttgtttgagcttagttgacacgctgctcttggcaacatgatcttccccctattttgcggggccaattcgttctctcaatggtcctcgcctgaaaatacggagaagctcatctgttttaggaactcggggtaaacttagttggacaccaattctaagaccccagataagcccactttgactttcaaacatgggggtgaggtaggtctagggttgcagtgtcgaaccccatttccaacctcacatgccggtgttcagctagaagatagtatagagcatagagaaatccgcatctaacagatatttgaaatatgctttcaactgaagtgaatccgatcagatgcgcatttcgcgcgccattctcacgccatgaggcgtgcccgaagaggaatctttttcctgccgttggctggaatctcccacgtcaatactacgctgtggtgaacggtttacccttatcatccgccaatatactttcgaggaaaggaagagatacacatcacatacgcgttaaattgcccgggcgctgacgattggcggtgcctcctatctcaggggcaatgaaacgccgacagcctgtagaactgcaaatacccgatatggtacctccgaggttgtctcagtgttcgtgggatagatggccatagtaaccaacatcctaaggagacatttctattgaaagatatcatttcatgtgcgatcaatgtatcaaacaattgccaaaaatatcaagtccaaaagctcgcagaaaaccttcctgaaacagacgagccctgtctctaaccgaagtgcggcaagggcgtgatgttctacctatcccagtgcaagccacggagatggccacggttgccttcaatcgacactcgcaattactcacgcaacatgatctgcaatgttatactccgtcaccgcgcgaatttgattacttatgaaactaggaaacagacctgtggcaggtgctagtcaataccactgctagaagaaagctctcaccattatttcaatcacagcatacagaatactctttgaatatgcccatttcgagcttgctgttctgtatcttgccttgacgcgcggcttctgccttgatcacattcttctgggccttcgacgctaccttgtcccggtgtacatcatctatacgaaggtaatgagccaagaacaatacaaaagcttcaccatcctccaatgcttgagaagaaaattgaccggagcttgaaggaagcgcatgtgctgcatttctaatgagtacaacgccatcttgctcccacgttggaagaggtaaagtccatattggatacatgctttcaacatgaagaaattgaataatctttgccaacaggtttctttcaaacagcatttctcacgcagttgacaaatcacatcaaccattgcgagtgtttcgagatcaggacattcttcgacctcgtaggttgaccaatcaaggggatcctggctgagagacgtgatagcagcagacatcgagctttctgaaaagaagtatccgaagaacccgttcccaccaaagacaaaatacatggaccccggttcgacaacttcatttacacctgccgcagggatgaagcccccaatcccgacgaggcctctgtcgacatttagtcacggaaacacacataatatggtgaatgactggatcaagtgttttaattttctacttactcgtagttcgggggatatgggtactccgtggtggatcatctattagatatctgatgcatttgggtatctctaaaagtgttggttgtccgcatgaagcttgacagacccctctttggtaagctctttaccctcctgcagagacgcggtttggcagatctctgtttgcttatcttacagggatgcttctcccgcgttccagcgcaggaattctttgtatcattgatgtatttgggtgtccactgttcctatgtagtgttctagacccctctttggcagtatccttgctcttctcgcagcctcatgttgtttcacttgcggcttcatgctgcgccgtgttgtgttagtatcttcttctagtcgagctgttgctcatcttgctgaagatgcttctcctggtttctagaggaggtttaggaggtggtccacaaatttattcaaagagcttcatgtcagtagctagatgaccatctccgtctatctacacagatttctcttctttgttcgtaactctctcactttctttctcattgtcacattgtctgtatatgtgcatcattttttgtccttgtaaagtttagagggttttatggcagtagctagatcatgatcaacattttatctcagacagatctcgcattggttgatcatcactccccactcttcctatcagaagaccgaaatctgaagcagaataacgcagcagctgcgatatcttcacagtgcttcggacaggtttggtggggtacgttgactcttctcataacgactatgaagatgggaagtcaaccgaagcgtacaagcgtcatttgacatagatccttacctatttgggcctggccttgcccaattgtagagctagaaacaccactcgtcgtgcttctaaagtcttggactcggctatatgtacttgatcgcgatcttacctttcctccttcatgaaacactcctagttaataataaaatcctcccaatgtctatggcaaaagactttacagaagaacaggacagccaaagaaatcttcctaattgagagaacttggtgcaaatatataggcactggaaaatgagagcaaatacaatagcagcaaaaaaatgcatcgtttcagcgtctgattacacgagtaattaaatccaagaatgcggagtcataatcgaatacaccatgtatatcccggttcacatcacaacacagcaagagttttgcttcttggcctggaattacttgtgttagtacattcaagtgaaagctacccttgacccttgatttgcatacctgggtatagaatttcttgctctgatttgacagatcgtcactcttctgaaccagggtgtcgatcttctcaccgcgctccaggacactttcgatctggatatggttagcacatataatgggctcatacagacctaagagcataccgtcttgtgaaggacaatcttggtttcgtcaagctcctgctggatcttcatgatgctgtcggcctgggttgggtcctggtacttgacgatatattccttgagctgcggcagggggcacgcattctcgcgcaaagatgggtcggagaaggcagtgcgtgggtacttggcaagaaactcgtccacaatcttgctcaaaacctggtgggccaccagggcaggatagtccccatctgttacaataacaccggcaacaccctctgtccgtccgtaagtatggaatgtgtaggccttctcctcaatatcctgtcgttggcccggctttgtcctctcggcgaccgttcgggtgaagagcatgaggaattcatcgtagctattaagcgtttcgcggttagtgacctagctgtgtcggaccaagagaggatgggtggatatacctctgacgagtaaagcgcgaaaagctagtgacaattagcgggttgttccagtcagttgcagggcgggcatatgaaattacccgtggaggtccttttccccgcatagctcgacagctggcttagggtcgttccggaaaacctgcgaggttgataaataagtaccgtatctcagctaatattcaatcaaatccaagctgtgataaaacatacgcccatataaagaatcttcatggtgacagggtgttgtccgcacagggacaaggaggcaagtaggtgttggggtcagtggggcgttgcgtggtggtaggtgattatcaaggaaacactctagtgtcaaagaactaggcaactcctttatattgtgggagatcagctgtatgttcagctggagtggcgaagcaaagtgacaagtgttaggcctaaaatagactcctgagttgcagataacaatgatgcactggaccctctggattatggcctgaggcatgtaaggtacaccgctcttgtcatgcgaccaattgatgttgagagcctgcgggcctggccgataaccactttgggttccctacaatattgtacattctttgtcgctcagcataactatcacatcttgatcattacatcaactagacagccctctcctaaacatggacagcatcgcagctaccgagtcacaatggctgttacaactagcagctatgcgccaagccattgccgatctgaagctccccaaggaccttcctcatgaagcgatcggctatggaagtgatattgatctggatattgacgacgactactcatccccgggaacaaatgatgatgtgtgggatatcatcagctcggatgatgaatcttccgacgacctggatggactcgacggacttcatgtcgcaccaggatcctcctacaatcgattctggcttgaagataagtgccaggatttggctatgcggaactcaactattaatgcgacggagcttgctgggcaagtcatcgccaccctggctgctgacagcaacgacgaagagctacaaatgtccttggccgagattgtgggattcgatgacctggatctggtgattgagctgattgcacacagaggagaaattctgtcggacaagggaccccgcttggaatcccagacagatgggctcatggcaggtagactccaaacacgagcagagagagaacatgctctgcagcagcgcgacttcgaacataagaatgcagcgctgatgccggcccaaacccgatcggagccttcctacccgcatgttttcaaacaacacacctctggaaatacactttccgccaatggaaagaaatatgggctgcctctgggtagtgagcagattgaggaaccaaagtacaccgaattcgcgattccagcgtcgaaggtcggaacacttggaaaaggaaggaaactggtggaaatcgctgaaatggatggcctttgtcggggtaccttcaagggctacaaagccctcaatcgtatgcaaagcttgctctacgatgttgcatacaaaaccaacgaaaatatgctcatttgcgcgccgactggtgcgggtaaaacggatgccgccatgttgactgttctcaacgccgtgggaaagaacacatctcctaatccgttagaaaacccagaagcgactgagttcactgtccaacttgacgactttaagattgtctatgttgctcccatgaaggctttggctgctgaggtgacggagaaactcggaaaacgtttagcctggttgggggtcaaggtccgcgaactgactggtgatatgcagttgaccaagcgggagatcgttgatacccagatcatcgttactacccctgagaaatgggatgtcgtaacgcggaaaagcactggagatacagagcttgttcagaaggtccgccttctcattattgatgaagtccacatgttgcacgatgagcgaggagcggtcatcgagtccttggtcgctcgaacccaacgtcaggtcgaaagcacacagtctctgattcgtattgttggtctatcggctacccttccgaactatactgatgtggcggatttcttgaaagtaaacaaaatggccggcatgttcttctttgatcaatcattccggcccgtaccccttgagcaacacttcatcggtgttaaagggaagcccggctccaaacaatctcgtgacaacattgactccgtcgcctatgagaaggttcgcgacatgatggagagaggccaccaagtcatggttttcgtccactcacgcaaagataccgtaatgactgccaggatgcttatgcagctagccgcggaggagggtcgagaggatttattcagctgtcatgatcacgaaaactattcgaatgcccttcgtgatatgaagcatgcccgtgcgcgtgaactgcgcgaccttttcgctagcggatttggaacccatcatgccggaatgactcgaagcgaccgcaatctgatggagcgaatgtttacagaaggtctaatcaaggtgctgtgctgtactgctaccttggcgtggggtgttaacctccccgcagccgcagttgttatcaaaggtactcagttgtataacccccaagagggtaaattcattgacctgagcattctcgatgtcatgcaaatctttggtcgtgcaggtcgtccacaatttcaggacaccggtattggatttatctgtactactcatgacaagttgactcactacctgtctgcggtgactgcgcagcagcccattgagtcgcggttttctggtcgacttgtggataacttgaatgccgaaatctcacttggaacagtcacatctgtttcagaggctgtgcaatggcttggctactcgtatctctatgttcgcatgaaacgtgagccgagaaactacggaatcgagtttgccgagttgcgcgatgatccaatgcttgtccaaaggcgtaggcagttgatcttgcaagcagcacgagtgctacaaaagagtcagatgatcatcttcaacgacaagaccgaagatctcaaagccaaggatgttggtcgtatcgcgagtcaatattatgtattacaaaccagtgtcgagattttcaacgacatgatgcgcccccgatccggtgaggcagatgtactcaagatgatcagtatgagtggagaattcgacaacatccaatccagagacagcgagtcgaaagagcttcagcgactgcgcgaggaagttgcgcagactgaagttgccggaggaaatgacacgccacacgcaaagacaaatctcttgttgcaagcttatatctctcgcgccaaaattgaggactttgctttagcatccgatactgggtatgttgcgcaaaatgcggcacgtatctgccgtgctctcttcatgatcgcgttgaatcgtcgctggggctatcaatgccaggttttattgtctctttgcaagtccattgagaaacaaatatggccctttgatcaccctttccggcagttcgacttgcctcagccgatcctacgtaacctcgacgaaaagcttccgactacttccatcgagtccatgaaagaaatggagcctgcggagattggtcagcttgttaataaccaccgcatgggcaacacattggccaagctcttggacaatttcccgactctgagtgtcgagactgagattgcgccgctcaatcgcgacgtgcttcgtattcgccttgccatctaccccgagttcacctggaattaccgtcaccatggagcatccgaatccttctgggtctgggtcgagaactcggaaacatcagaaatctatcatcacgagtacttcatcctaagtcggaagaagctttatgctgaccatgagcttaacttcactattccgctgtctgatccccttcccagccaaatttacattcgtgtgatctccgaccgctggctgggtgccgaaaccgttagcccggtttctttccagcacctcattcgcccggacactgaaagtgtgtatactgatctactcaatctccagccacttcctatatcggctctcaagaatcccattcttgaggaagtgtatggacaacgattccaattcttcaaccctatgcaaacgcagatcttccatctcctttaccacacaccagccaacgttctccttggttccccaactggcagtggaaagactattgcagctgagctcgcaatgtggtgggctttccgtgagaagcctggctccaaggttgtctatattgcacccatgaaggccttggtccgtgaacgagttcaagattggcgtaagcgtctcactaggcagatgggcttgaagcttgttgagttgaccggtgacaatacgcctgatacacgtaccattcgagatgcggatattattgtcaccacgcctgagaaatgggacggtatatcacgtagttggcagacccgtgactacgtcaggaaagtcagcctcgtgattattgatgagattcacttgctcggtggtgatcgtggtcccattttggaaatcattgtttcccgaatgaactatatcgcttctcaatccaaaggatccgttcgactgatgggcatgtccaccgcctgtgccaatgcttcggatctagccaactggcttggtgtcaaagaaggactgtataactttcgccattcagttcgcccagtccccctcgagattttcatcgatgggttccctgaacagcgtggtttctgtcccttgatgcagtcaatgaatcgcccaaccttcctcgcgatcaagaaccattctccagataagccagtcattgtcttcgttgcttctcgacgacaaactcgtttgactgctaaggatttgattaactactgtggtatggaggacaatcctcgtcgattcgtactaatgtctgaagatgatctggagttgaatctcgcgcgagtgaaagatgatgctctaaaagaagccctcaactttggtattggtctgcatcatgctggtttggttgaatctgatcgtcagctagcagaagaactctttgccaacaacaagatccaagttctggtggcgaccagtactcttgcgtggggtgttaaccttccagcgcatcttgtggtggtcaaaggcacacagttcttcgacgctaaaatcgaaggttatcgggatatggacttgaccgacgttctgcaaatgctcggtcgtgccggtcggccgcagtttgacacatccggtatagcacgcatcttcacgcaggactcaaagaaggctttctacaagcacttcctccacaccggtttccccgttgagtcgacacttcacaaggtcctcgataaccatcttggcgctgaggtatctgctggaactattggaacgcaacaagatgcactggactacttgacctggacattcttcttccgtcgattgcacaagaacccgtcatattacggtctcgagatctctgcagaggaacaaaacaccatggcagctcaggccacagctcaagatttcatggttgaattggttgcaaagtcgctcaatgatctcgcagaatcgtcctgtgttctcgtggactcggccaccggagaggtcgattccactcccttcggcaagatcatgagttactactacctgtcacataagacgatccggtacctcgtgtcccatgccaagcgtgatccgactttccaggatgtcttgagctggatgtgctctgccaccgaattcgatgagctgcctgtcagacacaatgaagatctgatcaacgctgagttggctgagaacttgccgctttctattgactgcatgggcgacgcgcccctatgggatccacacaccaaggccttcctcctcctgcaggcctacatgtcacggatcgatcttcccatcactgattatgttggcgatcagacatctgtgctcgatcaaggtattcgtgtcatccaggcctcaatcgatgtcatggctgagctcgggtatcttcctgcgtgtcagatgctcatgaccctcctacaatgcatcaagtcggcgcgctggcctgaagaccacccattgtcgattctgccaggcattccgaccgagaagccacctagtggtctcccgggaactcttgtatcgctctcgtcacagcctgttggtgcagtcgccgctctggtgaagaaattaaatcttccatttaacttcactcgcattacgtctcagctgcctcatctgtcggtcgccattgcaaatgtttctgctaagggcgtggctgtgtctttgacacggcgtaaccagcccacaaccccagaatgcaaggtctacgctcctcgattccccaaaccacaaactgagggcttcttcttgattgtctgcagtgctcttcccaatgggatggatggtgaattacttggcctgaagcgtgtttcttggccaccagtgtctaagcgcaatggaaacggcaaggacaagggcaaccatggtgctagttccagtcgcgcaggagctgccaaagataacaaggttgacgtgttgaccgttcgctcaaatattaaattccccgaaggcatcctcgcggattccacgagtacgagcacaggtcgggtgaatatcagagtcatcagtgactcgtacgttgggatggcatggactgtttccaatatcgaagttaatttggatactggcatcaatacgcagactgtggcagaggccagcattccaacgaaggactaaaataagatgctcaaactgtttattaccatacgacaagtcaatgcatttgcgaaaggtactggactaaatgtaaaacaccgacaatgaataacatgagcctttcaaggaatggattgagatgttgtagaaagtatcaagaccatatttggagaatagagaacgataggtacatgtagacaacgtatgagaggcggcaaaggggaatcacttatagaagaaaaaaagtaaagaaagagggggggcgaagaatgtcatagacactctatctgcaactcctgcgagacaccagcccgatgtccccggtgagcatctgtaatctgcggtgtcagaggtcttctctgcacaacccgctcctccggggttaaatgatcgatcctcatgccgatgggaaccagaacctgctgctttgcccgtgagacagagacagtgcgtgctatggagacctcaacccttgggataggacgtcggggctcgggtgcaggcgcctgttcagcggtatcaggtgtctcaacggcatcgacgaatggcatgcgcatggaatctgctggcgatacgccagatttaggaccggttgatgctgataatggagacatgattcggtcaatcttgtcctgggtagggtttaatgctgaaggagagcttcgggacggactgctagatagtgtgtctttcgcgggtggttgcggtcggtcttctgtttgaactctgagacatggtcgcactgagtcgttggttctttgttggctcgacgtcatatttggctggtgttgcggtgaagtaacctgagactgtttttctatggctcgcggcagggaatctttcctcggctgtagatgaacccagggctgagcgaccggctttgttacaacaatattgtgtggttgcacactctgttgtggccgggtcttctgcgaggatagggtgttcttgtccggttgagaaatcttctgtgattgaattgttgtctgtggttccggcttgatagcaggaagaggtttgtcgtagctactagaggactgcggggtattggaacgctcggagaaaagcttcggaatgacaggtgactcgaacgatgagacgctatccatatttgaaccataacgaagctgtggcgcaggcatccttgatgggctttcgatagggagtgtctttgctcttatcaatgggtttggtccacgagagaaattctgagtgccgagtatctgagccgctttcgaagggtgtgaagttggaaataaagtaaagtctgaccgcgctggtgatgttgcccggcggcgttggggcactgggggtggtgctggcttgaggaagtcctatatcaatgcatctattagtctcataccggtttctcatcgatgaaagaccatacatttgcgtctggtacgagaagattgtccaatgtcttggcccttctggccagcagtgagggtttttggttcttgttgacgacatcgctgaacatgacactgtaccgctccatctgaatatccgggatttcgacactaagtaagagaccatgggtacttgattcatctttggttggcttgttgccgagtgaaaaattgcgactccgctggggagtttgatcgcttcgaccaggcatctttctgggttcgacctcaaacttcggccactcctccgtcgagttctttctcagtcttgctttcggtggtttctctggtagcttatagttgttgctgtgtggcttgaccacgctttcttgtgcgccatccgggatcgatgtaggcgcattctttgccttgaacaatccgccgatcttcttccacttgctgggcttatgggctgagtctctttctgcgataatgaatgtatcaaatctgggtggtggtagcggctcatctttggttaacatgccgggactgcccagcgcaatgccaatcatgtgttgctcggtttgggcatggtcagtctgaatggcttcatctggtggtgcggttatgcgaaagtcgaaagttgcaccttggcccgatggtggcttttttagccacccgtctcctgcagagggctggctgaaatcccactggccaatcatgggttgagctggacgctgtgagacctcaagagagaaaaggtcgtcccgtggtaaggcatcggtataggtcaaaacaggaaaagagatggtctccttaggttgggtgcgtgaccggactgttgtcatgccccttgccatctctgtaattgtatattggaatccagccgataataggaatgagtgttaaaaggagaaaataatggaaaatgatggtattaaaggagagcagatagtaaaagaagagacgagccttccagaaggccaacaaaatgaaggaaacgaaacaaatagcaagacatcagggtataggccagtatattaatgaaaccagaggaacagattgagtggagaaatcaaataaccatataaacgagagctagagttaaccaaccggtctagtctgggactaaaccaacgaaacatgagaaacgaggccaaaactcgcaacctcattctgttttggaatttgaggggcctctcggcgttaatattcacgcccgtgtgagatgcttatttcccgccggacgaatgagcgcattggtcgacggattagctcgctaccaggccggaggcgtgtttcacctggtcaaaactgagacaatggcgtattattttccgttttacccttgaatcaggggcctttttcgctctggagcaatagcattggatgcccacatactcagtacagtgcagggtcatgaatgtcgtgactcgtgaattctccagcttcgcattgtgagtcgccaatgcaatgtgatgccaagcctgtctctatttccaatgggcatatctcaaggtctaagtactccgtatggtgtacggagtaagagacaaggctgcctgagacgaagataagaccatctgagacgaaagatgaatctgctattggtaagtagcggtcagatcaccccttgaagttttggggtttaggcactgtaaggcagcaaagcagtaaggcaccaaggcattcaggcattcaggcatacaggcactcaggcactcaaggcagcatgatgatcgagtcccgtgatctcccgtgatgatcgacggtacatgaagtgactgggctaactggactggactggtaccgcggcatgttatatgtatgtcatacatattcaatgctgtactcgacatgactgccttgaatcaacagaaaagttgttgatgttaagctcctctgtatatttaaagatctcccaccgctacttggagaatatccgatatcttatacacaactccacaccctacacaccctacacaattattacaatgtccctagcatagacagattgaataagatattctgaatcgacgcatcaatagacatacataaacaaaaataagcttgtatcccaagtcagttgcaaacggtgggatcgtcatatggcggggtcctctcccgaccgccacaacttcttctccccccaccaactccccttattctcccagctctcctttttttctgtatattcaaaaggtgcgccctgaaatttctgctttcttctcttcttgactgtctaactcaatcaactccagcgttattctctcagcttctttacagtcatcatgggcgagcactcagcaatctggcaaagtatgaatcaccttgcactgcagactgcagactgcagactgacaggtcggcccttgcttcttcgagttcgctaacatgagatttccctcgaaccaggctatgtcgacaccaggtacaccactgcccctcctcaaccccagatatattcctcaatgctaccatcgaaaccgaatcatctcacccgtgttatcctatacatatactgacaagcttcttttctcacagcctgatgggctcgtttcaattcgacaaggccggtattctcgccgctgatttctccggtgttgaggctgcctcgcccggcttcgcggtaagctcgcctattgttttccctcgtgcggggtggggtcacaggcttcgacacatccgctaacgttattggttgtcgaaatacagctctctcaagaggagatcaactccctgatcaccgcttacacttctagcgagaaggccttttcctctggcttctctgtctgcggtgagaagttcgtcaccatccgggctgacgagcgcagtctatatggcaagaaggtaagcatatcccttcgactcataaatacctcgggagttctatcaacgcataccactggaatctggtctaatctatttgatttgtgttacagggtaaggagggtgtcattattgcccgtgcctcctcttgcaccatcatcggccaccacggcgagaatgtccagactaccaacgcggcgaccgttgtcgagaacctcgttgattacctcaacaacccccggtaaattggaaaatattcaaggataactaaatgatgtgatgagttgaggggtttgtgaagaataggaaataaagcagcactcgactatttctcttttgaccccagcgtgtttttttcgcttatgcttcttttcttgctttgtgactggatctctttgcctcaatcggtcacgtcaatctagacatacctcccaatgcacagtatgaggatacgaaccagattgtatgaggcacgacgtaatttgtctattctaacatgcatattaactgattaccagccgcgctggaagatcaataagggtcattattaattacataaagcggaaggccgtagatggatcgtatcatccatgtatagcacagcgtacttgcacacaaacaaggtgatgtgcatccgatatccggtaagggtacatcgtgaaatccacatacacggagtctgggataccatcaaggaacctcattgtcgagtcgtggtttgtatatactcatacaggaagctcggcattgctcctcccaccagcaagcacctccagcccacgctggatatacggccctatcacagggatgttgcccgcaaattgaccgatggtgaccaggaagtcgccaaacaggatgaacaagccgtagagttctatcaaaaacccagtcaagggccagcggaagagaataaggaggataccagcggcgaaagcagcagtgcccttgagtttttgcgggcgcgtgaagaagaccgtggttttcctgacgccaataatcagagtcaatccgatgagaaagaggacctagcattgtcagttagatgtaacagttttgttagagcatgtggcacacatttcccatggcgagtctagttaacaggcattagcatttattctcccaaaaacgtgaaacttctggatagacatacaatgaccggtcaaagaacattaatactcctccaaataggaacaagcctcctaattagcaaaatgaattagttctcgggtccgagtaattagtgatttgggaaggtcgatctcgtaccggcggagcagaagatcacaccgatctctgttatataaattagcctatgctcgacaattgctacacatgtactgtcacggtagtgaacatcacagcttgtagagcgaatgcgactgactctggttctctgttaaccacatgctaggcatccttcttttatttcaggtccgactgttgatgatgatatatgggaccgaaggttgctcaaatatccgcgatgtacttttgtaggacacacgacacctatcactggtgtgcgaaacaaatgatctttgatggttgtagactcggtagggcgaaaccaggcagatgcggcagggacaaagcggatataccggtggcgtcgttcaaagtgggtaatagcgagtctaggtttgcagtatgctcacgacgtgcaatattctcgacacagatcaaggtagcaaaagtcccgaggcacgtaaacaagtcaaaaatcacaattctgccgcctaatcagcgccaagccgggaatggtaggcggtgactccaaagcgcttatatcgcgggctgatcattcccttcttcctttcccttagtcttctccaatttattggcaattgaacaaggtcattaatgatgtgatagtttcaattgcataggtttgtgacaatctcaattttcagttctaaatctactggtattgagatataccgaactgaaccacacaatattgagcacagctcatacatactgctactcgctattgcagaaccttcctctctatgtatttttgtacatgccacgccgcgacgacagtctcttcggattctgtaactggtgccctgttccatggggtgtcggtaatagtcgagtgcttctgcacaaggcgaagatcgactcattgatcacgaataagccggagcgttttcttgagcctgtctcgaaaggggcatggtggggtggaaaaggcttgactgtgttggtcgtacataacgcttattgacgattcgtatttttgtctatctcaattgattagtagtgctctgacaatccagattctttcttgtatgacatacccgttcttacatgatcgttcgtttgggaattgataaagtaagcaacggccgccttttacttcaaaatagtgtgcgccccgcgggcttccaggtagttttctggaacaccctgtgccagagtccggatcaccttataaatctccttgttgtgataccgcagccgggtcttggggtcggtgtaaggtccatccaggcccgtgatgtcgcagtagtgatgctggtaggcagggttgaacgatggtgcggattcgatgttcgtgtaggtgacagcaggaccggttgggaatgtcgcccgggcattcttctccaagacgagagtcgagaggttttgggtggcctgggacaggttgggtgctgccccttctgcgggggtttgtgtgccatcggtgagagcgcccgagttaccaggcgtagtttcgcccgaattgacttgagttgccagtactgaagcctccttccgagaggcctccgagataatctgcttcagattcttgttgcgccgctgggacggtttccagtgagggttgcggaagggcttggggacatgtgaaatgtctagagtgttcaacagctgctggtgagcttcatcgttggcaggagttggtggaggcatgatatggaatatgattcaggatctcaaacggataaggtcaggtccaacgtaagaagcaatgcaagtagtatccccggcccgcgaagtctgtatagccgcacgtgatctcatcccgattaagtccaaataaacacctgaacgtccaatacccacacacattactcaatattcagtcatggtacgcggtttctcttccctgtatcaattttgatgcgatctgaaagatcccagatgctgatctctccttaggaaagcccccacgagcatcagcagacggtgctgctctctcgcatcatcaccaacgtcgtatgtgattgaaccacgtctgcaagatatactctactcaactcatacataggagaagctcaatgaagccattatggtcatgaacaaaggtctccaggtaggttcaagcctctcattgatattatcatgttattgactctatcacaggaagtcaacatccagaacatgaacgttgagcttgtggcgcagatgtttaagaactaccagtctaatgttctcttccatcttgaaggtatatatgactatcatatatcagaaaacctctactaataccctctagctaccgagaacctccaagacccatcctaaggaattctgaggatggataatttcatgtaacgaggaaatgtatggacgagcttgcaattagtcaatgataccaacttctaaattcaataactaggcacatttaaatggttgtaatcgttgcatccctgtgctccgtactccgtaccagcgatagtgatagcgatagcctctattcttggcggtccaactccgccaaactcatcaaccgcgtgtgtgtcctctttgttaatccgctaccctttctgcggtttattagtttcctcatatccaaccttattcccatgcagtgagccctcttcgccatctacagatctccgaccccaatagctcctggtttctggagcgcagcccgccatgacgattacctctgtgcacaccctcctaccagctcgcattgcatccaatgcgagtgaaaaacgaaccgagaagcctcctccaaaactctacactgtacaagactttccattcaagggctaccaccctccgcaacccgagggataccagcagagcaaagcccatcccgacaccagtgctattgtcattgacaatggtaagggattccataactagagtttgtgattcaattctcctaacagatgtggtgcgcaggctcccacctcgtcaaggccggttggtcttttgacaaaaacccccgattcgctatacctcccgttatgagccgataccgtgatcgcaagctcaatcgccagtgccaatttatcggatacgatgcctacgtcgatgcgaccacgaggggacagctgcgcaatggctttgaccccggctccagtgttgtcggtaactgggatgtcatggaaggcgtgttggactatttgttcctcaagctgggcgtggacggcgcagatgggggcgtcggtcgcccgatcttgatgacggagccaatcgccaatatgccatattcaagaaagagttagtatcgggcggttttagggccagtatggctgttgttgacacacctccagtgatgaatgagatcctcttcgaatgctactccgcgccatcggtggcctacggtatcgattccctcttctcctatcgctataatggtggaacggatggtttgattgtggattcatcgcatacctctactcatgtgattccggttatgaactcgaaacccatgctctccaactgcactcgtctcaactggggtggcctgcagagcgccgaatacttgatgaagctcatgaaactgaaatacccgaccttcccgactcgtttgacagacgcacagatggaggaaatggttcatcagcactgttacgtctcacaagactacgagcgcgagttgagtgggttccttgactggaccgggctcgaggaccgcgaccgcgtcattcagtacccgttcacggaacacattattcaagagaagacagaagaagaactcgcgcggattgcggagcgcaagaaagagagtggccgtcgcttgcaagaacaggcggcaagaatgcggcttgagaaactagtgaagaaggagcaagagctggagtactggaaagatctgcaagagaccctagctaacgagaccaagaaggaaatccgtcgtatccttgaagccgaggatttgaaagacgaggcggcacttgaaaagttgattcgcgagctagagaaatctatcaaacgctcgcgcaacaaggatctaggcattgaagaaactgaggagcagccggaggaaatgacattccctatgctcgatatcccagatgaccaattggatgaggccggattgaaggaaaagcgacaccaacgtctcatgaaatctaacgtcgatgccagactacgtgccaaagaagagaaggagcgcgaaaaggctcgtattgaagcagaggagcgtctagaccgtgaggcgcgtgagaatgatttcgagaactggattgcaaagcgtcgcaacaatcgccaggtatcttggccaaacatgatatcctcgatttccgtgctaatatttctcagggcattctccaaagaatcaaagaccgtgaccgtttcacggccgatctcggaaatcgcaaatctctggccagtcagatgcgtatgaagacgctggccaacctggcatctgacggtcctaagaaacgccgtcgtggtggggatgacgatgacttcggtgccaatgatgaggactggggtgtttaccgcaccgtagctgttggcgagggtagtgacgatgaagaggaggaggatctcaacggtatgctcaactctgtagagaaggagcttctggagtacgaccccgaattcaccgagaacaacactttcgccgcacagtccgactggacgaagagtcttgtgcacgcgttccttcgcgggccctggcctttcgatccggaaagccagcgggaggcacaccagctccatctgaacgtggagcgcatccgtgtgcctgaggttgtgtttaagccgtccattgctggcctcgaccaagccggtttgatcgagattgcggccgatattattaaccaacgatattccaatccagcagaccagtcccttcttttgaaggatgtctttttgactggaggaaatacgttgtttaccggtttcgatgaacgcttccgtaaggaagtccgcgggttcctgcccatcgaagctacactgaatgtacgcaaggcatcggaccctgtcttcgatgcttggaagggcgcagcacagtgggcttctggtggtgacctaggccgatcctcggtcacgcggcaagagtacttggagaagggcagcgaatacatcaaggagcatgaactcggcaatgctacatggtgaggtttaaaaagcgcgttctaagaacgcctgtctgggcgcactggagtcgaatggttctgcttatccggcgtggtatattaggacatgtttatctaatacttcaaagattttattgcagaaaccggcggtagtaagcgaaatatgacatgttcagccctctgtatggttactttaactatgttaatagagccggtcttgccagagcatggggtagtagaggtgataagtataggctatctatgcatctcgatggcaagggacccggcgaacgtattcattccccaggtgagacacgctccttgcatttatcaatgagccatgtttaagatagctggtctagaagactgtcgatcatggcttatgcagggagaccccgctagtcaactattgaagctgcatattatagtcttgtttttctcatgtctcgatggttatgcaccggcggtgccattcactctttctcgctctgattggcacttgataagtacaacaccacaagcttaagcagacgttggattatcctccgcaaactgccgactggcttttgtttgtttggggttattctcgaagtcgccttctttatgtaaacctctaaatcgacctcacttatgtctttgcgtacgagaacatgacattgcccttaccacatgacctagatatcgacgtcgtataaaatagaactaaaatgaacttactgcacgatatagttcgaatagctacacaaatgaaaaggtaaacaaatcttcaactacctcttccgataacctgcagcagaaaccattccagattaggatatgggccagacatagtgacttcatccagatgccatcatgacgcacctggagagtttttgcttttcgtccttgctgaccctggccatggactgtggtgggtcttattgtattttatacctagcgtcagtcttgtttgtttgccttcgttcatgctaattccgagatataaagtccttctctttgctcatttgccatgaaggccaactcttttcccccctcgctgtatcgcgccccctttcacgttttatatacttcttggtccttatacaaacgatggtcttctcaacaaacatcgctcgtccactgcaactggctactcgcgccatgcagtggagtagcgctgtcattgtcatgggcctgacctcgttcttcatcaatcgtggtccccatggccagcatactatctaccaagaagtcattgtacgttattggcgctctatttgatcaaacagttttcacaaagccatggaatctaactgcaagcttaggctgtcctctcagtcgtcttcttcctcctggcttttatctcgccattcctaccctcgttgagcagattcgtgctcgctatcgacgtggtattctcctacctgtatgtcagcattcgatcatagtgtctgcatcgaagtctctaatatccattccagctggttgactgccttcatcttctccgcacaagactacagtacgagacggtgctactttgctattcccgcgggtctcagctgcaatagcaagagagccaatgaagctttcatcttcctagctttgtatggcctgaatgcccccagccgctatggataggtgaaaactaatatatcgcagtatcttcaccttctttggaatcttccttgaaaccgccgctctatgggcctatcgcaaggaaaacaccaccgaacgcagttatgaggataaagtccatattgagacccgtccacctcttgatgcgcctacagttcctgcagttcctgctggaactgtctaaccggtgtttcaactacttctctggataaatatgcatctactatctcttgttgacgttctcaatcgttgtggatatattatttactgggatgttcaggaaaccgtcttgtgcataataccttatatctggactctttgattcttccactagccttctcttttggttttatctcggtggacttggattttggcaggggccaaattgaacatatgtttctatgagcggggatgggagggtgaaattgatatctgatggacagtatcgcaggctcgggatacgaccttgcagtgtgctctctcccaataacttaatccattcattacttatactgtgaccgaaaccttcgggtgtccgatatggtgataccttttccctttcttaatcaacattacacgacatactgaagaggcctctcctatttcaggtttttcatgatgttctagccgaagggaaaacataaaggctaaacaataatggcctgattcgcataactgaagtaaaaatactggaagtaaatgtcatatgactgccagcaaagctgtatttctattttattgtctgactatttacaatataagtatacactgaatgtacaggttcgataaaagaagccacccaatcagtatcttacgcaataaagaaagtaagcaccaagcagcgcgaatcgtacgcagtcttgcataccggatacaaaaaaggtcaagtctttgcttaattggactcgacatatcacgcagagcttggttgaaggataaatgttggaacggttagatactagctcggcgaggagccatcgtccgctgcaacttgcgcttttcctcggtttcctccgtgataggcagtgagccctcgctcctcaagcggtcgaggaactcctttccatatgcatagccgacttggtagatctcgtcaaatttgccgaactctagggtaccatatgggtcgacaggaggacgcatgtatagacagccagtcgtattctttgcgcgctcgaggttgtcgaacgatgagacatacgccagtcgtgcttgtatttcggaaagtgtaggtgggttcgggagcgaggagaagggattccaccggttgaacactgaccagaatcctgacaatgagtctccgaatccctggggtgtggtgtcatcgatagatccaacatcaattgcgaagatagcatccgctccaagacttttcatgtgcgccactgtgagattgtcgatgtagccaccatccaggagcatactgccttcatcacagataggaggtatcaggccggccaatgtcatcgaagcccgaacgtaccgccagacgtaaccagacgagtgatactcaattcgggatcggctgatgttggttgtgttgcagtagaactccaaccagaaatcttcgatttggctatctccaaatgtcttgaagattccccggttgaactcatgacctgtggtgtaggaaacagtgggataggtcaaatccaatgcaaaccgccacatactccccatgcgcccggagaacttcttagctcgcccgtacataggaacaacatcagcgtcacgcgcgtaaagagcaccaatgaaagaaccaatcgacgtgccacctatgatatcaattgggatcccggcctcctcgagggctttaataactccaacatgcgcaatgccacgcgctccacctccgcccagtacaagacccacagacttgccgcataaacgccgagccagccgatggaaatcacccttgaaggaggtttgcggggaatagagtggagactgttgtgcacgccgggacgtatacttttggatttcggcttgcaaaatttgcacgcgctgcttcagcacagtaccgaacttcctagtcggcgggtgtgaaggctcggtggtcgagcgaaagcccatttgaatgtggtgatggccgccgttaatccacacccggttcttcagccattcccgagtcagtccaggtgcacagtaacgctctgcgtgcaaaagaactagttctttgcgagcagtggtcttcatgcctagcaggaagcgctcatattcaccaattctaggtgaagactcggcgaggcccaccaacaggatagagtcagcttgcgcaatgcaagtctgagtccacggtgcgttcacattggtgtcagcgatgtacaagaccattccgaatttctcttcgaggtcagccaggtattgagaaagcttaagcttccccatcttagtgaaggcgtggcgacccaagtggttcaaaattgtcgcttggttgagtgatgtgacacctctgggcacaccaatttggtgcaacgcctgcaagagtctatgtccaaattctacgaccgggacgccagaaatgatgggaagaattgccacggtgcgaagattgactgttgaggttgcagtctgaacactgccagtctgtccctgttcaatcttcttttcggccagcggatgctcgactaaatcacgcattcgctgggcaataagtttagagacctgcatggtaattccaggatgttcctgagcgagactgttgaaaagagaccgggggaacttggctagttccgtttcccggatagcatgcaaggtagacggtcttgtagattcagtcatgacctcgagttcgccaacactctcgccctggccgtgttcaccaatgacggttatcttgccgtttgatccctcaaggacagacctcaggcgaccgttcagaacaagataaatagcatcgctttcatccccttggtggtaaatcacctgccctgcgctgacctgcacccactccagcgcgaaatcaatgtggagcagcaaacggggcagcagaattgtcaaccgctttgctagcgttaacagagcagttggatgtctatctgcgattctctcaagggaagcacggggaaggaatccaacgtaaacatctgtcttggcgacaacatcggtgtacgagcggtacgatgcaagagcacctacatacccttgaatgccaccaggtttgatcaggtatagcgatttgcgggactgagtctttcgtcgagggtcattgctgcccgctgcaccagcgcgcgacgatgatgtcgttgttcgtctcagcttcgggaacagctcctcttgcgcttgcgagccagatacatgagaggccccaataagggtgtcattatgttcattcgccggaatacccacgtccaagaatccgtcaatgacgtagtagaggcctggatggcgctcacccttttccactaaaaccgagccttggggaaagtaaactacttcaatgtcatgtcggaggtcttcccgtaggttgatgacaggcgaagtcccccctgcacttgtcactgacatggaggacatcatggattcagtttcgccgtcacctgacgcttcatagggatcgatgaagccaaaggcattggagaacacagccttctggcggcggttatcgtaggagagtagtctcggcgacgcatcaccagagtggctgctcttgcgcagagcatcgcgtgtgccttcggtgagcccaatgcccttcatgatacagtccaggatcgactcgcggaaaatagcgtcctcgtcaactgactcttttagctggaaagtcgagggtagaccattcattgcagctgtggatacaaattgaggttgctcccgctcagtaagaggagtctggaggcgaggtgccaaattttcatgtcgcggtccaaaccgggacaattgtattgtcgatagcaaatcaccggggctaacacttgccgagtccctgtcaatgaatggtgacgacctttgttggctatggagtgtgaggggacgctcacttgacacctttgcttgtaaaaaggcttcttttctgagagtactgctcgagcgtcctctacggcccacagaaggattgtgaagagcaatgccttttccgatttcctctggtcccaatcgatctcgctctcgtgtgaacttgtccttcagacgatccaaggcactccctcgaagattattcggaaggtcccaagaggtgaatttagacatttgccgctctatgcctaaaacctcgctagtcaggcccagataagaatgcgctgtagcaaacgttacccgctggagacgtgtcaggataacctggacaatgtgtgacgttgcccgtgggtagactctggtcaggcggcggaatgcgctggcagggatgatagcaatcgtcgtgtctactgtagctcgtgccacaatatctgggtgtaccgacttgcggctttttttctgggcattgtgtttagtctccgaatgtggggaatgtctgtggttctgccggggcatggtatggctctctccgagattcagcggaggcactggtggcaatatattgccagatccaagggatgcagtgttcaaattcccggcctctctcacggtggacccgggactgacagcaaaggtatcaggcacatgagtctggccaaggctaggactggatatactggagctgtgacttcgggagttacgaagctcaatgtcttcggtaaacagctggagaatagagaataaagacgacattgaagcgccgttcttgacttcagtgaggagctgatagccctgtcggttgtgaatgttccggtcctcctcgtctgaagaggcatcatcgtccatatagatattctctcgcgaacctgacttcccttcgcgtgctgatttcacgaagatctggaccagcccatccacaaccatgcagaagcccttctcctcctccagcatgagcgtctctcccgcaatcagcttcctagtttgcatcgtccgggtaagttcgtggaacacgggccgttcaaggtacccaaagactttgatagcactgaggaattcatccagatagttggcaagtcctggtttcgagtccccttcctggatatcagggaacaaatcgacctgggcttctttgcgttgaggctccgggggcaggcgactgtacgtgttcaggtaccggtaacggatgaaccagctgagggtcgatacaatggcaaggaagattaacattctaagggtcatgaatggtcagcaacggtcaagaatgaagttagcaagaccaagacctacatggtggtgaaattcatagtgaacgtcaagctcatagagaaaagcgtaaagagccatgtggggagtgtaattgtcgcgaatgtgattatcgagtagagaaggcttgggagggtgtgaaatactagggtaaacacccatccgatccaccccatcatggttaagggagctggaggggactgcgggggttgagagaaataggcgctagaagcgagggaattaattgaggttgaagttgcagccgttaggctgagggcgagggacggggccaggccagccatgttaaacacatgcaagattggagagctccgctttgtgttccacctgggcaggtttgaggtcgagactaactcagattgacctagaccaattcggagttgaacccaaccgtgggcccattaggccagaagattgaaagcatcgtactttatacagagtgaagtggtaggtgggatatggatgggaggggagagggaggttcctagttcccaagtcacctgctttacgtttaaaggcggaatgtgagattcgcatttgtatcagtttatgatttcaactcatgataatattctgttagcctattctgttccaattaatattctaatgttattattttatgatcctatgatcctatgatcctatgattccaaaatatcccggttataacaggccaatccacagtgatgtaattgtttacaacatcaggccttacacacgcaggtaacaacacaacttcaatttgatatatgttgatacttggaatgcgagcagatctgaaacataaaatgtataaattagagaagttgtagatcccattggtgtgttctacatagccctttcacgcaagctgtacagcaaatatatatgcaacgttacagtctcaaacccccgatacaactagaaataagaacaagctaaataaaaagcactgggcttagttcgactgcgaataaaaatacatagattaataaaaaaatatactaatcttcatgaattcaagtctccaacatggcaaaaaaagtagagacagcccaagttgaccttccacatggcaagtttccgccttggctacgcttccaaccttggaaaccaatgctccccctcacttccttttgcggattgctattcttcttgtttttggtaaacacccttgccagtggtcttgcgtttctagattctgttgtcgtctgggttctcagaaccgcggcaatgtttcaggtacctattcgccctttcgatgatgtgtgcgccttgtgttctcactaacaccgtcacagcgcctccgcgacgccatcgactctcgcattgcagaggaacaagcacgtcaaaagtccgcccaagataacatcgaacgctccaattccgctcgccgtccgcccggacgtaaccagtccccgagtcggcgcgcccgtcctagacgcaacaccggtacccccgttcgagggcccgaccccaaggagttcgaagctgaattcaccatcggtgacgatgaatccatcaggtccggtactccccgagcagatacaccagagcctgcttcggaagtaagcgcccctaacgagggagagagccaaatggccgaaggcaaaccggcggagacgcccgagaaagagacaggagagacggagaccaaggaggcacctgctgtgcttccacctgatgttcgcgcgaaattgcggcgacttgataagctggagtcccgataccatggtatgtacctgcctgactagactacagggcacacgactaactgaacgtattagaattgctcaaggcttaccgtaccgcccactcgcgagtcctatccattgaacccttcgaagctgctttgcgcgagaacacccccctcacctcgattggcgaacccaaagctttcacggaatacctcaaccaatcaaccctgaaaagcgatatggtcatggatgagctgaagcgcgtcaccgaagaaagagaagacttcaggaagaagtttgaagaagcgcagcaggctaccaaggaggctttggatgagcttactggcctcaaaaaggagaaaccccagacggagacacccatagggacagacggaacaggggagcaagctagtgaagagttcttttcgtttgataatgaagttccccgattggaaggcgaacttaaggagaagaaagaagaggttgagaacctcaaaaccgaggtcgaaaagctcaagcgcgatatgtctgtcacccgcgagtcgaccgaaggtatggtgcagaatttggagacagccacccgcgagctcgtcgagctgcgggaaaccaaggacaatctagatgctgagatcaagactctacaaacctctaagaaggccgatgtcgatgacctcaaggcgaagctagcaactgcggaatcctctctcaaatcaaccacattggaggtcgagaagttcaagtcgcagctcaaggagaagagcgaggaaatcgacaagctccagaaacaagcctccgaaagaactgagtctgattcgaccctcgctgctgagttggagacgaccaaagaggaaaagaaatccgacgagaaaaagctcgttgtgctccagggcttagttgacagtctccgatctcagcttaaagataccgaatctaccgtgttacaattgaagactgagatcgacgagaggtgcgaacattctgccaaactacaagacatttttgatcttgtggatgagaacttgaaagagaacaaggcgtgggtatctaccaaggagaaggttttcgttggagagttagccgacttcaatgaggttatcaagaccctggtgccggtcaaggaagagcccaattctactgtctctgctcctgtcactaccgaaggagagacacaacctgctcaagctactggtggtggcagcagtggaggaaagaagaagaacaataagaagaagaagaagggtggtaaagcagaggaaccttctaagtcgactgatgcagcccctgcagagcaaccgcccccagaggcgccttccacagctaccaaagagctggatgaactcaagcaaaagatcgaatctctcaccctgcaattatccgaaaaggaggccgctatcgaccgtctcagttccaagctaaaaagcgaggacaatctgaaggaagaaattgagtccctgcgcgatgaccttatcaatatcggccaggggcatgtggcagcgaaggacaagatcaaggatctttcagaagaaaggacctctcttcaagaaaccatcagcaagctcgagaaagaattggcggaactccgcaccagcaacgcttcgacctcagctgattcggcgaaggtgcatacttcactcaaagaggaattcgataacctcaaggtccgctctgttaccttggagaccgatctttctgccgctcagcagctggctgctactcggttcaaagaccttacagacctccgtgaaactcttcagaaggttcagcccgagctgcgcagcctacgtgctgagtcttcggagttgaagaccctaaaggagaccctcgccagcaagaattccgacctgaaggtcctcgaaggcaagcatgagaatctgtgcgctgagctgaagacatttaagtcgagaatctcagagcgtgacgcagaagtgggcaccctcactaagaagatccgacaggagaccgacagccgattgaaggcggaggagtatcttactgttgtccaatccaatctacgctctgctgagggcaaaaagcaagatgccatcaatgccagagacagaactgctgccgaactctccaagacccaggacggtttgaagaatactcgcgccaagatgcgggagatggatgaacatatatctcagctgaataaggagctcggaagcctccgagaagagatccagctaaagacagctcagtacactagtgcccagagcttgatgaacagtatgcgtgatcagacgacggaagttgcaatgcaaatgaaggaggctcgtgagcgatgcgagagcttggatgaagaattggccgacgcccaccgtctgctgagcgaacgaacccgcgaaggcgagaccatgcgccgtctgctcaatgatatcgagggtcgttcagaggctaaggtgcgagacttcaaggaacgcatggaggctgctgtcgaagagcgagaccgtgccgaagatgaagccagcactcaaggtcgacgccgtgctcgcgagatggaagaactcaaggctaaggtccgtgaagccgagcgcgccctccgcacggtggaacaggacaaggaggagcttgaacaatcccaaaaggactggcgccgccgtcgtgacgagctcgagtcagtatctgagaagtcatcacaggaagtggcagagattcgacaggccatggccggtctacgcgatgctctcgacgaaagtgagaagcaagttcgcgacctcgaaaaggacaaggcagagcttcgtcgttcagtggaagagacaaacagccgactggagaagctccgaagatcccacaagacgctaggagaggacgtccgcctacgtggctccccgtccggtcgaccatcctcgcgatcatctacggattcaggctctcgtcgggccgtcgtatctcctggcagaagcgagactcctcttggaccacccagtaatgcatctattgactacatgtacttgaagaatgtccttctccaatttttggaacagagggacaagaactatcagaagcagctaatccctgttctaggaatgctgctccatttcgatcggtgagttttttactgaaccttctctttacaatggtcactaacaaacatagaaacgatgagcaaaagtggatgtcggccatcatgtccaaataattggcgtttatacccatgggcgttgattgctatctgagtcccctgctctgtacaatatcattctgtagagataataatatgtttccgctatcagaccatacccctttgcctatgaagacaacgttcagatatccttatccaacatctagttagaagagctcggtaatattacctaatccggtatagtaaaatcctggggttatcgcgaagcttcgccaaaacaagcgacgcgcatatactagcgagtacaaaagtccgagagaagcaaataaaaaacagctaagctctgtaattcgtcatggattatcttcgtcctctttccaacgccatggccgaccaacccaccattcgtctcgcgacgcccgagggcaagtgcattgaccccaaagcttctgagtagctccccaattaacatcaactagatgtccccttgatcctccaattcatctgtgaactagccgactatgaaaaagccctccatgaagttgaagctaccgaagaatccctcctagcaactctctccttccctggtaccccgcccaggcgcggggcggtctatacagctctcattaccccgccggctactgccgacacaccgaacccgatccccgtcggcatggccttgtacttttacaactactcaacatggagatctgcccccggtatctacctcgaggatctgtatgtgcagcctagcgcgcggggtaacgggtacggcttcaagttgctcaagtaccttgccaagcaggtgctggaggcatcgggtcggcgattggagtggagcgtgctcacgtggaacgagcctagtattaggttctatgagcaggttggtgcgcgcggtatggacgagtggatgaagatgatggttgaaggggatgcgttgactcgtttggcggaggatgtgtagagggatgcatgggtgctaggcgggatagggctgggttgtcttttttttatactacgaaaggcactgggaacggatcagagtggtttatttatattgtagaagctcattgcagatcgagaacaaaagtgggctggttatgcgtgcatgtttagcaaatatctatgatcacagctacatatggctcaatgtcatattttcgaaaaaagaaatttatatcgaagtattagaatccaaatctcacgtcattgatgtaattgaatacaaataacatccaagttgggctgtgaggtagatctaggggcgaagccttttagcgccaggtgacggcattgacccgcagatcgcctcgatttgccctgttccactttctcttcttccttcaacaccctcagcgatggcgacaactccagaaaatgcccaggagtataacttccatgtggactatgttatccgttacagcttcggagacgtaggtgagtaaaagagagctctagcatgtgtcgcggggcacattctaacaattgcagaccgatcgcaggcaattgagcagctcgaaaaattgctccaagcactggccctagttggtttacaggtcgaggtacgacagggtgatgagtcgtctctgctcgtctttgctcgagcttcggaaaaccggctgaaacgggcggtctaccggtcgcggtgagtgatgatgcatgtcgttctatgccaatgtgctaatctcgactttgaatatccacagagtacgcgactggctatatggcattcgcaatgatgagcccacaccttccaactcgaccgagccgcagaccgaggctgagcgcctgcgagtgatccaccagatgattacacttcccaaggaagagggcggtgccgccattacccccaagtatggcgactggaagaatgtcactgctatattccccattcatgatgtcgatacaaataaaaagtggatacgagactggagctcaaagactttcctctccgatgacgacttggatcagatccggaacaagtttggagaaagtgtatgtacagcgaagttgttcttctttgtcctggctaacatatgaggcaggttggattttacttctcgttcctacagtgttacttccgatttttgattttcccagcagtcttcggattctcctgttggttcctgctcggcggatattcgattatttatactgtcgtcaattgtctttggtgtatcatctttgtggaatactggaagcgccaggaagttgatttgagctgcagatggcaaaccaagaacgtctcagctgttcggaccaagcgacgagagttcaaggcagaaacagaggcctacgatgagggtaccggtgagatgcgcggtgtcttcccggcaactaagcgcatgcaacgacagctacttcaaatcccgttcgccttgcttgcagcaattgctttaggtgctatcatagcgacttgctttgccattgagatcttcatctcagagctctacaatggtcctttgaagacatacttggtatggtgatccttcccatttcctgtgaccaaagcttacccttcagattttcatcccaaccatccttgtgtcagcgcttgtgccaaccatgagcgccatcttgacgtctatcgcaacgaaacttaatgattacgagaaccatgagacaagtgacgcctatgatgttgcattgacccagaaggtctttgttatcaacttcatcacgtcttacatgccaatttttctgacggcctttgtttacgtgccctttgctagccgaattgtcccctacctcgatgtcttccgcttgacagttcggcctttcgtgtcgaaggaacatgccatctcaaagcgatcgaatttccaaatcgacccagctcgcctgcgaaaccaggtcgtctacttcactgtcacggctcagattgttggttttgcaatggaaactattgtgccgtatatcaaacagcatgcactccgcaaatacaaaaagtacaacaaggagcgcaatggtaagatgaacggaaacggcgacaaagaatcgcctgaaagacccgtcgtgtctttcgatgatccggtcgatgaagtgcagttcctcacgcgtgtgcgcaacgaggtcgagcttcccgagtacgatgtgaccgatgatctacgtgagatgtgtattcaatttggatacctggcccttttctcacccacatggccgcttgttcccctttcgttctttgtgaacaactggattgagttgcgatccgatttctttaagatttgcatggagttccgcaggcctgtcccatcgcggactgacacgattggaccttggctcgatagtctgggattcctatcttgggtcggtagtatcaccagtgctgcactgctgtacatgttcagtggcaacacgcagcacgggcccaatggtgagccgacagatatcaaaggctgggccctgcttttgacaatcttcttttccgagcacctgtatcttattgtgcggtatgctgtgcgggctggtatggctaggattgagccccccaattcccgcaaagagcgggctgatcgttacctcatgcgcaaacgctaccttcagtcgacaaccaatgcggaggtggacgagaaaaacgatgaggatgatatcacatatatggttcagccaactgacgtctcacgcacgtctcttgaagatgatgctcggcgtgcgtcctcgcatggcgccgacccggacaaccgtttctggttgcaccagcggggctggatggagtcggcgaagatcggagctgggatcatacaggcacagcctagcaacgatagcgcgaagaagcaacaatagtgcttcggagttggacagagtcaggatgtggaggcaggggcttgagaggcctatgttatggggtgggatacgagatcacgagactatatacgttcaacttagtacgcgatgtgcaggtacatagtaattaccgatatacgttcgatctactttttaagctgtcctaaatggaatgattgtccagtggctggtgcctcaggcagaaatgtcggagtacgtggtgactatgatgtcatgttgacttggtcggaaacaagtaaacccgttccgataccggatatgggcggcatgtggtcagcagtagaacgaatcgtcgacatgtccatgggtacgacgagatcatgcaattggatgaatgtgacgagctacatagtacatatcatgaggttgttgttaaacccaatcatagccaacatgtggtatcaaaaccagtttagcggcaaaaaagtgtcgagataaactctggggtaggagccaccgcctcactcaccgcctactcaatgcgacatcttcgcttaccaactccttacataaatcgacgatcgccccaaatcctctgactcagaatccttaagtaatcctcctcctcctccagggcccgccatcaacttgcttacagcatcggatctgtaactgcttacctcattttagctgtattttgtgttcagcaaagcagctctctttgctctcaattcttttggaaactaaagtgccgtgcaaagtcactgcccaataccctctcgaatcccctttctgcttaatcaatgcaacctgcactggcgccagcgccgcatccaagcatgcagacttctgctcaggtaagcaggtcatcttgaacgcgtttgtcatcagatctatatgacttcctcgatgctttggatacaagacacttatgtcgcgttaccaaaatgtcgggacgacgtttcgacgcgtcgggtctccctgcagtcttgccacgtcaccttggtgcttcgttttgttatttgctactgtccatgctaacatatgactgtaggaccatgcggatcagggtacgtgattatagtttagagctttattgatgtttaattgccattacttttgggggattcaaggattcgcggttttctgggttgaaaataccctaccccgatcttctacttcatctcacctaggaaaattagggctgcgcgtcgcacatgattgttccccattgctgacatgatcttatagtcctccatgaccagcttttggctgctcagcaccacctaggcggtcgtccgcagggtgctccaggccaacaacaacacttgcaacccaacaatgctagcccgcgcgaccagccaaacattgaccctgccatctcgggtgccatgctcggcgctccccaaactcccacccaaccccagggctctcccccatctgacggcggctccaagagctatgggaagcgtgagctgtccacttctaagcgtgctgcccagaaccgtgccgctcaggtatgtcctttagatatcgtacacagagtactctgctaatcatcagaatagcgcgcattccgccagcgcaaggaaacctacattcgcaaactcgaggaagaagtgaagaacatcgaccccctcaaggagcaggtcaagtccctggtgggcgagaactaccagctgcgtgaatatatcatcaacttgcaatcgcgtcttctcgaagcccagggtgaagtccccgagctgcctgccaacatagatttgagccagcctcgcaccactgagatggcgcttgcttctgccggaattcagaactctagccctccagggtcggtgcccaccccgggtgcacaaggccagcactcttctgtctccgatgacatgaactctctgaaccgcatcgctgcggcaactcttggaatgcgtaagcaccctgatgacacggccttcctcaacaacaacagcttccagcagaataagcgggtgcgcacagatgatagccaggacggaaatgacggcgtgaacaagcaggagattccgcacggtcttcctatggtcaactgatcgccatgccgttttaatgcgtcttgattgcctacgttctgcgatcacctttcgatacccgcgtctgtgtcttttgtttgcttctgtcttattcagcttcggtgttacgttatgcttgacgacgacacttgccatatttctatctcgcctgttctgctggatctcctgtgcctttctactttaccgttatgtcacgtcccccctttgcgtaacggtgtgtggcgcagcgagtgattccatcctcttgatttcgaatacgtgattgggtggtgttttgagatttgttaccttcattgtggcagattgatggggagtttattattattaccgcatttgtttcatacttcaatttgatctatctgcttaattgcttaatggatggtcacaagacgcggatacccatacctaccccagcggactttcgctgcctcgtgggcgatttctatagcactcctttgatgaggactttataatgtcgcccagcgtcaagcttgctgggcaacttagtccggtctgaggcttttgagctgctccgtgctatcgggtttatgtgggctgtactccgtagtatactaatattcttcggcgttttcaggccttgtctaaattaattctttggaatgaagtgaataatcatacccatagactagagatttagtgacacctttatggagagatgagatccgatattaaggtaatcaaagcgagaggtgtggctacatgtccgttctcacaggcgaagaagtcggttcacttccagtaaatccgttcacttatatatacacttatacatgatccgtgaatctactgcaaaaagcatgacagcattggcctcatacgatatgtagtacttgtatacttttagtgcttcgaacaccttcagtctgggagaagtctagttggatatttcactgcgaaaaactgtcatgcttatctatttgtgtccctgcgttggatatgaattctcgtggccagtccagattattgaacaaccttgtcttaccaataccgtagtatctatcacttactgtttatcgaggtcatattccttgataaggatatcagcacaagtaataccagtcacgtaagcagtagcctgggtgtggttattagtgaggacaggaacaacactcatatcagcaacgcggaggttctccatgtcccgaacacggaaacgcgtgtcaacagcagcatcactggcaccagtcttgcccatcttcaccgtgccagtcatgtgccagctggaacagagcgtgttcttccagaactcgaggatgtcctcgtcggaatcagacgcaggccccatcagcgttgagatagtgtccttcgcaaagcactcctgtctactgacatcgagcaggtgccgataaatttcgatacaagcgcgacgatcgtatggatgtccgaggaaccgcgggtcgaacagcagcgggatgtctgggtcagaggactgcaggtgcacttcgccgcgggattgttcgtttatcatgaatgctacaagacagctatagctgtaatctttgaacatttcgggcttcatgcaatggaggggcatgtgggtggctatctcgtagtgggggatggtttcgcggttcaggaactcttgcacggatgttggaagcgctttgaattcgggcgaggcggtgatacggtctgatttaaaccagccggtgccgatctggcagcagtatcggttccataggccggtgttgtcgtgaagccactctttcattgcagcctccatggcggcgggatctttaaagaaggaattgcggtcatttgtctcagggttacgggcaagaaccagaggaaccaagtagtggtctcggagaccctggccaatggcgggcagatcgttgaccactgaaatgttgaacttctcaagctctttagccggtccgattccagagtgcattagaatctttggggtgtcgagtgtgcctgcagaaagaataacatctcgagaagcgaagtctgtaatccatgtcagacgaagtgcatagtaagagttcagaataaaatatacactttgtgccctgagcctctactccaacggcctttttgccttccaacaagacccgctgtactgggctgtctgtgacaacgacaagattatgaggaacattttcaaacatatcaacagccgtggtacgctctcccttccaagcagaattgattgttgcagccatgccaaggggattgccggagttgtgatccaagttgagcttgtgtccagccgcttcgaatgcatccagcgtgggtgccaagtccctttcccaatcctgggcatacccgacgcgcaagggacccgagtggccgtggtcggaagcaaccgaacggacatatttctgattttttggaagtacacgaccatcgaaggtctccaaattcttgtagcggatatgcatctccttccatccgaaggtatcgtcatccacctcagatgcccactcatcgtagtcatcccgcgcgcctatagcaaagaccccgaagttgattgccgagctacctcccagaccctttccacgggaatagtcgccatcgtgcccattgcaatattcctgtggtgtggtcctgtacccccagttcatgcttggttccctcaatgtcgtccaacgctttccattcactcgcaaagctttgtcatcattgcgcccacctgcttcaagaagtagaactttaggtctttgggctgatttggcgagccccgcagccacggtgcaaccagctgggccacctgttcaatgatgagcatgagagattgcaggtgtgtatagtgcacgattacctccgacgatgacaaagtcgtatgtgtttttagattccatgttgaaggtagctttctagagtcaagaatttgtcaagagcaatcgtgaagaacctatttagatggggtcagtggcaacacgtcaagtatatgtcatatcttctttctggcatgtttatgccattattccgtctttgcgtgcattaacagtaagccaacatgtgaaaaatagtacagcgtattaccactaggccacaataattggtcttggtctaaaggcggctatatctgttctgtttcttgtctgacaccacacactcaacatgacgggttgtactcggtacaccttggaagaacccaacaatagatggggcaaggaaatatacacccccaggtttaagagggctagcgtcgagactgcaatcctcacaggatattgcatttgtttatttacgacacggctaaatgggcccttgagtccaggaggttcgttagtcaggtcaattttgcaggggttgtaaatgtagatcctatggcgaaggatgcatagcaaattgaggctaattcattagtgtaacaccagaacaaggctgcaacatggtattaaccaagggcatttaaacaaactctttgtcgcacagcatggctcgaatggtaatcaccgggatcaaatccatggtattgattctcgaatccagtacctttcaacacttgcactgttgcgaagtctgcagcaagcccgatttcacgttgctaaaagatagtataaagtgtcgcaagatatcccaaaatagaaaacaataagactcaagccggggatccacattaactaggatatcgattttcccaaagctaggaggtttcgcttgaaagtgagcagtcgtttcttcagacaaagcaagtcatatcggacgcgtaacataggcccgtgcggttatatctgcaacgggaagatctgacgggccgaagacgcatacgcatattgtgcgctctgcgcgctgtgcatacgaaatatcctttcatgccgattgaaccatggagtatgagtattactagttacggagtacgaggaaaatcaggtttaagtcatcaatgtcacgagaccgtagaccgacgcgcacggtccctcatgttgttttgggtctggatcctccgcaagaaaactgaccaatcgcagctgagagcctccttccccactccagtagtcgcggaggttagcgcaaagaagattcgtcctcggcaattgagacatgtcggttccttatggagggcgaaagtatattgtacatactccggatatagacggcgccactctagccacccgagccactcgagccacctgaggttgttaatttcaatggggaagaaaaagagagtagaccaaaagctgagatttgaaatcggaaatgatcgtctagttctattgtgtagatcccatttaattcccagtcactaaaattggaacgaaaaagcccaaaagttcacgtgtggcggttccaagggttccctttctcggcttagcttggcataggggcaaacctttatgctggggatagctctggagttttctttcctcctgtctactcatactattctcattattataatataacggcattgctggacgttcgcttagcttcaatttccgccttgagtcttcgacctcgtcatcggaaacttctttgaaacttccaagttacatccgccattcttcggcaaacgaaatcgcgatcagagcctcccacagatctcaatctcctcaggcccaaaccctcgatccctttcattcggcattgacctcgttggcgcaaatggtctgctcggactagcaaaactatgatggctataccggggttctcaccaagcggggcatgaaacattttctggtctttccaataccaacattgaatatatctcccacccaggctggttgagtcggcgaccatgacagacctatcacaataccccgacggcctgcatggttaccgtagccataaattggcggtgcggacattgatgattgtctttacctccatcgcattctataacgccatcgaattgctcatattgttatttttcaccttcactcgttatcgcggactctacttttggacgcttttgctctcggtagtcctcggagtgatccctcacgccgttggccatctcctcgcgtttttttcactggccccattatggctctcgttgactctctccactattggcttctacgtcatggtcccaggtcaatcgctggtgctatactctcgccttcatttggtggtcaataacaacaacgtgcttcggtttgttctttggctgattatcatcgacgcgatcattctcttgatcccaacgactattcttacctactctaccgcacacattgcaaatccggcaattattcggggatacaatgtcatggagcggatgcaactggcctggttctgcgcccaagagattgtcatttcgggaatttacatcatcgagaccgcgaagctactcagaatgatgccagacaaggaccggcgccggtccagaatcctatatgagttgctggctatcaatttcgtcattatattgctcgatatttgtttactcctcgtggaatacattgggttttactcgttacagaccactttgaaggccatggtttacagcatcaagttgaagctcgagttcggtgtgctcggaaagctagtcgatcttgtgcacaatcatcgatcgcaacccacttcgtccgaacacgaagaataccctggcttcgtcgatccttcccagattacaacggatgtcacccatgcagccccacgggaattgcgaccggggggacggagaggctggaatacaatatctgtggagagcttgcccaattctgagcgcgacactcgtccatctacccagtcgactggcaagagcctgcatccatcttgaggttggactagtgatcaattgtctaccactcagaccaatggtcgaaataaaacgaaatcaagcaggagcaggccgtggttgcttactccaaccgcctttctgcttttacgtatggcgatgggtgatggtatcttcgtttgcttttcacaagaaaagtacctcgacaaatcttcgaaagcaacccatgatcccgcccattggaattaaaattccctggtttcatcacgcttgcgcagcgagccgttttcgcacctccggcgcatcaatcaaatgcccatcgttccttacatcccagcgagattcgaacagccttgctgtcaattcctactgaatgtacgatatacctgtctatccaaaattcctccaggtccaccataggcctgcattgtttatatgtgccagatttatattggcaacaataattatttaacgccacgtccacgatttgttgattttcagccttatgatgtaattacttcaatgaaatattacgtcgccatgacatctcatcagacaccaaaaccagttggcaaatttttaaatttagacaaaagcgtctctttgtagtcaatgcagcatggaaaccaccgtctcgatttaccacggcccgtacgagtccatccctgacaacgcttcaccaggccttaaatttctaaaacgattcctaccagcactagactccctaacccccggcgaaaatgtgatcagccctttcttcacatccagcgcccccatcctcatcgccagcgatccaccaacaaccgcaagccaagcagtccctatcctcgaagtgcgcagccgacatacctccaaattccaccaccatgttgatctcgcctgggatatagaccttcgaggtgacacaggccccatcaatacgtcgtacagcaggactgctccaaacgcggacgccgcccaaaaaggacagctctatgctccgctagtagggaacatacagatgaagcgcacggttatgtttgaagcgacatcggaaacaaccttcagggaggatccctgccagttcgcagttcgagtccgtgagttcaacatcctcgacttggaaggccgcgacgagtcggatctgcagattgttgagatgcgtatctttttggaccagagacctctccaggctcattctgcgagtctattcacgggctccggctattccggatcttaggctggagtactccgtatacgtagattggataaatgtaatgaaatttcatggatcgatgtgcttggcttctccactgcggaatcatctactaagccccaagttgaaccaacccccgcgcccccacttggaatgcttccatgtctttcttatctttggagatcatattcggcaagggattcctttcctggcggctttttgcctctttgccttataaggttgcattgcccagtgccggaagttgtagacgattcaaaaattttcacgagttaacaagacaagatgttggcagcacagaaacaagcagagatcatccacaatgtctctggggctttggataagtatgaatccaagctcagtgagatcaatctgaaggcgtgtatgatataggcaagcatattaaggctttattaacgatctatagatctggtccaaccccgaactttcattcagagagtatagcgcccacgacaacatctgcgaacttttcgagtcactcggggatggatacaaggttaacagaaaagcgtatggaattgaaacggcatttgaagtgatccatagccacggccagggtggacgtaccgttgccttcaacgcagaatacgatgcccttcccggcatgggacatgcatgcggacacaatctgatcgctacaagttcgatcgcggctttcctggccacgtgcgaaacaatgcgtagtctgtactccgatggaattggctattcggttcggcttctggggactccagccgaagagggtggtggtggaaagctgctcctcatcgacgcgggagcatacaaagatgtggacgcgtgcttcatggtgcatccattccccgtgcttcccggcgcctctgatcttctaagcgcgagttgctgcaccgggctgtatcttgcaaacgacaaggtgaaggtgacgttcacgggcaagccggcgcatgcgtcggctgctccgtggaagggtatcaatgcgctagatgctgtggtgtctgcgtatgtgaacatttcaatgctgcgacagcagatcttgccgacgcaaaagattcatggggttatttcgcgaggcggtgatagaccgaatgttattcctgcctctgcgacggttgaatactatattcgatcggagactgcgaagacattgaaaccattgaccgagagggtgctgaaatgctttgaggctgctgcgattgctactggctgcacggtggaatacgaatggtatgagaattggcgatggtctattttgatacgcttcgctaacgcatctgtcagggaggcctcgtacaaggacatgaagagcaataagcccatctgtgacagctacgtctctgctatgaatgctatgggccacaaaactatcttcgatgccgcgcagcaggcaggggggcttagtggagggtcaaccgatatgggtgagtgttccagatcctcacagtttgacctgaggctgagccactccaatctaggcaacgtttcatacgaagtacctggcttccacggtggattcttcattcacgccgatggagttaaccatacgccgcaatttaccgccggagccggatccgaggatgggttcaagcgtagtttgcaatgtgcagcggggatggctgtggtggcgtgtagagccttggtcgatgcaagtttcgccactgccatcaagtcggactttgagaagagtctggaattgtaaatactagcttgcatttagcgttctctcgtatttcttgtgggatctttcgaaattcaagtacaagggtatgacccgtgctcattgacaacttaccctatttgtacaatgacgattcggcaattgtcgcagatagagtgtgtgccgatcgacagtggatacaactgccggacttggcctccactgagggggaagcggatgttcccccaaattgcctccgtcatgactttgacaccatgaaagtggggtgccgaggaagatttattcttcgcggattaacttcgcggggaaattccggtaacctcttaccaacgccgagaccgactgcaagtgtataaaatcctcctttggtgtgagaagtgttgcaatctcggttgcgatcggtcaccgtcggccatcagccacgggcacagggcttgatgctgccggctgagtcttccctaatccgtcgatagtcttggctgatcccatacttcttttgaatctatccaaacccccggaaatggatccaacgcgattcgcccataatgtacctgttctatttctgtatcgctatgcgaggagagaactgcatcgactagccgataattcgtattctaaacatccacaggcctggcgaatgtgataccggtggttcgtttgcctctcactaaacccgtggacgctccgatggcttgagaaaacaaagagaaccgctcgtgtccgtccactgtcactttatctcgcacttcatttcattttttgtttattattcccttcctctgtgcatgttctggacctcggcgaacaccgaccctattttccccctctttcgaataattccccctatcagatatccaagaggcggtcatagctttgacggatatgacgagtctctttgttatagctgcatgatctgttttctatatgcagaagcccggtgcacgtgttggatctgttggtctttttttcctctgggaagttgtcctgctttcattggaaaaatatgcaaatctttcgtcgactcgatgtatcattatgactgcgcacaaacttttcaaaacacagacattaatagaaagtaacacatataacaataaaaacaagcatgtctatagcgacaggggtataaaatgaaaaaagctggccgcccagtgatgattcgactatagccagtcgaagttcatcttgcagtatacatcacgtatggaaaattatgtccctaacaagttattaacatctgttcttacttcgggcgctcgattaatgccatttcaatcgaagactgcgtatcggatgagggcagccgaggccgagcatttgcccgtgactcaacaatgtccatagttgacattgtctggcgcatggcctcgtgaaaatcgtagattccgctgcgcgctgaatgctgttccgggctcgccgttctcccagcagtgccagcactggagctagcttgcgcctcagtatcctgtgacgggagactgtttgcgagcatgtcgaagagattgatgtcggtcgaacgacgagcattgccattagccccttggcaaaaggcgcatgggtaagtgcgtgtcagctcgcggagctgcgtaagggcgtggaattcgagtttcagcttgatactgtaggcgactgtcttgaagctgatgacgatgtagtgcactttgtactcggcgaggaggatcaatacgttgagcaggatgccgaagagattaacgaagagtattcggtagatgattcttcggccctgcggtccttttgattcgaagacgggcttgagcgctcggagtgcctcgcggacgtagatggcacagattattgtatcttggatggcgaatccggttgcctgtaaacgatcgtagattcccgatacggggccgcatggtatattgccaacgttgagaccgaaaaggacggccatgggaatatggaggatgaagaaattggttatgatcatccataatacccatcgtacatggcggatatcggccacgacgaggtgcagtctggaatatagcacgagcgcttgtccagtcaccatgcagatccagcccaccataaaagggactgacatggcaatggcagaggcttgttgtgtatagcgaatttgagctggtatggcatgtaacaatatcccccaggccgcgacttgcatgctccagaagtatagcccgcgatactttttgaacctttcgaatatgcaaatcacaacttccaacgagttccacgctccgatcgagaacatagctatgacctggacgatcgtgaagttggtatttaaaatgaggctcacctccacagggaggttgctcattgaggtgtccatagcgtgtgaatcggtttggccatgtggataaatcagccggcgggaaagaaaaaatatatattggtcacagctcggacaaatgccccatctagctgacatacaccattataatggagacttccctcgagcgcctcatcctgggccacggggtgggacgggataaggttgactgctggtgtagaaggtggatcatgtcactggcgagtcatgcccttcgcataaatgagagagaaagcaccaatgcagtctatgatgctagcccacggggatctggggcagatgttccggttcattagacagtcaatgaaattctgaatgggctattggtagcaatgatatgaagatcccagttttccctcccccttaatcatgttggttggagagcttattggacacagcaaacgaagggacaaaagtcgagaggctatcggcgcgccaaacagggattctcgggatctcaaacaaagaaacccagccagaagtcgtgcactgatcacatttctttcgctagtggcgcaccgaaatgggagcccagacctcccatcgaggcattcaggcattggtaatgacgattgaatgaagagatatggagtactccatacggagtagagaggaagagaagaagagaagaatagggatggattgacgtcgacgttgaggcttggcgcccgttggactcggagctctcctgacaagaagtggccagagcggagtactttgtgcacaatgaagtgttgtctttgaagtaatccgtattcgtatagaaatataacaataagcatggagtatagattgaccgcttcaatattcaacgtatccaatatatacagatcggtgaaaggtgacacgtacatggaacttatccaaaagctcaagcgctgtgctacgaagaagagatagtacagagtagagaatgtgtacattaatagattggataccgctaagccatgtaccccttattggacatgtaatttgaaaaatcgtgtcatgtcaaatccctcctgaatccctttgaatttatttccgatcaacctccagttctgggtaatcagggagtttccagtccccatccctatcgcttaagaaccgtgacaacagttgcggtatgcgaaggaaacaagctagtcctagaatgagatgcagaagtgaaatttcccattgtgagttggggattgcccatcggagcaatccagtgttgaatggctgaaccaggtcgatgaaaggtcgcattttctgatggtagttttgaaaggcctgggacaaatcttcactgcgagcaagctctccagccaggatatatgccccaaccagaccactacttgtccccattccactcaagggagaaggacagtatgccgcatcccctagaaggacaacccgaccggagtgccaggtatctgtcttgatttggacgacattctggcagaaccagttctctgtagtgtccatcccttcaataaaccgatcggcctgctaccccgcgtcgcgaaacctttcggcccaaaactgtttttgctgcccaactgaacgtttcgggatattccgaagttcttccgagtcagatctaagcgtgaagtagacttgggtttccgcttgattgtggcttctggtcaggatcatccggccgcccgggcagaggtacgacttgcacatattgctgtcagtttcaatccgtggaacaaaccagtacgccatgtgtacaccgagctggtgatattcgttcggggcatcggggggtagaatgtgctttcgaatttgcgagccctgcccgtctgctccaaccagtagatcaaatgtatccgaagagccgtcggaaaaggttgcgactaccccttggtcattttgcgcgaagccatccaccgtttggccgaatatatatttcactttgtcttttgttgcgtcgtaaagtatgcgcacgagatccccgcgcatgatctcatactcggatgtcatagactgtgcacccttgccagacttattggcgaggacttcccccctgacattgcccttcgcgtcaatgaaggagacgcctgcttcgtcgacgagcttttcgcgaacggcgtccatgagacccatgcgtttgacggcctcgatgccttgtccgcggaggtcgatctgggcacctgtcgctcttagcactggggaccgttcgacgataacaacttggtgaccatttcggacgagccagaaggccaaagctggacctgcgacacctccgccacaaatgaggactttcagagccattctgtagagattatctaggagagagttagaagaaacaaattctctgtgtaatcagcagtctggatttgaattttaggggtagtaagccggcctcgcacaattcggatataaagggcaattgctccttttcgctgtatataccggtttgtcatagtgggtcatgactctgcatcggaggcatctcataggcaactattttggggctgcggaggcccgtggctgaaaatcaaggaacgggagtttcaccagtacgttgagtatttgaatcatccatagaaaaaaaaccaagaagttaatgcatgatagagctaagtaacactacaaaaaatgatatgtaatcgacaaattattcacaggcgcggacggccggtcacagggaaacaagggatatcataacggtccaaattcataaccttggcccaggcagcaacaaagtccttcttaaacttatcctgggcatcggagctggcgtacagctcagaaagagcacggagctcagcgtggtgaccgaagatcaggtcaacacgggtggcagaccacttcttggcaccggtcttgcggtcgaaaccttcaaactgctcactgtcagcgccggttggcttccagacagtgctcatgtcgagcaaattgacgaaaaagtcgttgctcagctggccagggcgggaggtgaagacaccgtggtttgatccgtcccagttggcgttcagagaacgcagaccaccaaccagaacggtcaattcaggggcggagagggtcagctgctgcgccttgtcgataaggagctgctcggtgcggacacgacgagtcgagtggccgtagttacggaaaccatcggcgaacggccgcagccagccgaatgactcgacatctgtttgctcctgggtggcatcgttgcggccaggggtgaagggaacgggaatacccgcggatctttcaagggcggcagatccagcaagcacaatcaggtcagctactgagacgcgcttttcgccgttctgggcactgttgaagcggctttggatgttctccaacagactgaggacttcctgcaactgcgctggattgttgacatcccagtccttctggggagcgagacggatgtgggcaccgttcgcacctccacgcttgtcaccaccccggaaggtagaagccgatgcccaggcagtggcaatcaacttggtgggctcaataccggtcgagagaatctcgttcttcagcgcaatgatgtcgccattgtcaatcagagcgtaagtgggagcaggaatgggatcctcccagagagaaacctccttagggatctcaggacccagccagcgagcgcgaggtcccatatcacggtgcagcagcttgaaccacgcacgggcgaatacatcggcgagctcatcagggttcgcaaggaaacgacgggcaatcttctcgtaggcgggatcgaaccgcagagaaagatcagtggtcagcatctgaggcttgtgcttctttgagtcaaaggcattgggaacgatatcgcccgcattcttggcgacccactggttagcaccagcgggactcttggtcaactcccagtcgaacttgaacagatattccaagaagttgttactccacttggtaggagtacttgtccaggtcacctccaatccactggtgatagcattagggcctacaccggagccgtgcttgttgtgccatcccaggccctgtgactcaatgccagcagcttcgggctcctctccgacattatcagcaggggctgcaccgtgtgtttttccgaaagtatgaccaccagcaatcaacgcgacggtctcttcgtcattcatagccatacgagcgaatgtgatacgaatatctctggcagcagcgacagggtcagggtttccatcaggaccttcggggttgacataaatcaaacccatgacgaccgcggccagcgggtcctcgagatcgcgagttttgatatcgctctgtttagcctcctcctctggggtctcggcctcatagcgagcttcattagtaaaccagacgttctcacttccccagtacaccgactcatcggcttcccagacgtcaggacgacctccagcaaatccaaatgtcttgaaacccatggattccaaggcgacgttgccagttagaaggaaaagatcggcccacgagattttggtgccgtactaagtacaagagttagtattgattgagaaactagaagtatagaagtgtatagttctcaccttctgcttgatgggccaaagcaatcgacgggccttatctggaaatgaaagatacatatcagcatgatatagatgtcaactcaactattaatggaactcaccaagggaaacattatcgggccaagagttcaatggtgcgaaacgctgctggccctggccaccaccaccgcgtccatcgaaaactctgtatgttccagcgctatgccaggccattcggatgaaaagaccaccatagtgaccaaagtcagcgggccagaactcttgagagtcggtcataagggcgtgtagatccttcttgaggccccaataatcaagggtcttgaaagcagcggcataatcaaagtccttattttgaggattggtagcatcagtatgctgacggagaatattcagcttcaaggcattaggccaccagtcagtgttcctagatgagatcagtatgttgaagcggtatatcaaatgtgccgaggcagaatcacgggagaactagggaccataccgggtaccacctccagcaacattgctcttcttgtgcgcaacaggacattcacccatgatggcagttggtatgataaagaaaacgggaaatctgaagagaaagaaaagtgtcgggaacaggatgcccccgcagtttaaatggtacaggctgtggatccaatggcgggtcacgtattaagcagctcccatgtttagtgcagattccctcgatatgctagtttaaagggaaatcatacgaagatgacgtgaatttatctttcttgaatttatcattggccatgcagcgacaaaatccggggcgtgcggggaaagccataacagtccctcacgaagagatcaggaactcattggcggaatgcgccgaagagcgccggattccgattcgacccaatatataatgagctgacaaaatggccatttctagatgctggaggttgtttgtagatatgagaaatgttgaatcggagaatctttgcagtctggccctatgatctgactaatgataattagttggagccgggccctgataatcgcccaccggtctatgttgtatgtacggagtacggagcacggagcacggagcatatactccgaaaatcaatgtatgaccctttttcctttttgattcacatatagaattagtggtctagtagtacataattcgaaattctccttgaacggtccactgatccagagaaatccttgttcggatcatggtttatccgagccaaatagggcggtgtgttccagcttcggaagcgattgcctaatacagactagcgtaaatatacaactctaaccagctctgataaactgcattcatcgtcctattctttgatagctttactcactggctggttagataataatatagcctcacctatctcttgttcttccctttcatatcttctagcaatagaaacctacgtcacgtctatcattcttctctacggcaagctggcagaaacagttcaaacccacccaaacatcaactacataatccgtgatttatcaataaaagtgctctagtattgaatatcctaccaatgaatttaaaagcttaataattgtttgaactatgggccatcactgcaacaggaagctagcaggatgatgcttcacaatgagcgcaatgtctcatacatttcggcaataggaactcacccaagctagcaagattcaagaaataacgggcttggtacccatcctcccacacgagactctcaatcagcaaaacttgtgaatttcttgaagacctctacattggccttcatttcatttcttactggcaaaacgcctgtcgctattagaattgtccatatattccggcacttttccttttttgatatcccctgtgatacacttggaaaggatgtgaccgtctatcagtgtgaggcctagcggtctgatcaggcgttacttactatgggatcaacaagatctatatcgcggctaacgtttgatcagactatagcggccaatcaggcgttagtatcaggaaggtacatgactatacaatggcgtcgccgcgacgatgcgattaatctagtctcttctaggaacctatatgcattcacctcaaacggtcttcttccttttgatcctcttcttattcatcccatcatctacattcacggccttcagccactacttcgttacaatcttttatcatctgctatcatggcagctaatgccaccagccataatggccttcctagtcacttctctttccgccaaggtatttccgtcatcaagatggaactccacatgacacctgaagctgctcagcactactcggatctgtggaatatgcttgctgctcgccagctgccttctgagcaccttggcctgatcatgaccgtggtgaccctggcaagacttcattcctcctttgccaacaatatagtcgcctgcacccttgtcaggacattcgtcgagtcgaagcaaattgccgggcttcgcgctgcccttcctcgcctgccggacgaacttgcggctgtcattcctaatctctttcaagaatccactcatgccatcacgatgttgccggccatgcctgccgaattctccgagatcttttccctctctgcaaacgatgaaactgccctccgccgggagcttatccacctagaaccgaagttgaagcctgcgatctccatctcggacgatgagttcaacatcattgtcaataatcttcccgacttgccgcctagcattagtggtacctggaaaattccgctcgaagtgttgtccactatgatcaaggagaaccaaggtctctccgacaagcttggtattttctggaatgtcctctcataccaggattggttcgcggtttacaatgccaccagcttctttgagggccttaccaagtttgccacagccatcgcagccatggatggcaacgagtcccaggtgtattgggatttctattgccactttctccgagtgattgtggctaggcccctcgcctagatgcaggattcactgcattgtctaagcagcggtcgttttcttttgcgtcctctcttgtttcatgagaccgttgcttcccattcagaagagcactagccagctctcactacgaattcagatttctttcactcataacatctcacatcttcttattcgtaactcatcatatgcacataaatttgatatgcccatcccgcaaaatatcaggccagctaaatgttcctccagacaagctcacctcgtcccttttggtccatatcgtctcaaatatatgtttagccaccgatgcatgaaccaaggctgttgtccgagcgcaattatcaaaccatgacgagaagaacacctgtaactcaggactaacagcctcacaagcagtgatgaaagccggccatatcagagcagcattatgactacccttctgatcaatttcctcttgttgaatttggattagatagccccggatggcattgacattgccctgaagcatttcaggatcaatttcgtatattcggcggtgaaagaaaatagataatgctgtgtacatcgcatgagatgttgtagtcatcaccactggaagagctccattataaggctgagcatagcttggattcgcagccggtagcaaatgggcaatagctctttccagaccctttgctcgagtccaaaattccttgagactgagcctactttgtcctgcatcagacattatcgacaagtctcgctcattggcaaggcggatcacttgggagagtagcatgaggaatatctcatcgattccgtatagcgtgggaaacagcgttgagctccatcggccgggtatcgcaaggtggaggtcacgctgggctatcccggggtccttttccatgctcattgtggttgtggaaaagactaaattggggtagatacgaaagcctcctccatatgtagtgttgtcgttcaaagtaccacttgccccagtctgattcatgctcaatctatcagcaatgcatgttgtctcggccataatgcgcatgtaagcataacagtggtgcaatgctctcttgttggctgatagcgctggctgactgagccccttgatgcaaatgagtttctccgtttggacgagataggcgcgtcgcatttctgggtcaccttttatcatctgtattagagagaatgttagccatgtacagtgaattcacattgaggccatacaaaagcatttgaaagactcagcattgccatcaaaatctccttatatttgctcattttcgtcgctgagatacagctttcttccatacatcgttggaaatggtattgagcctgtgccaagtatctcgctgctgataattaccattgctgaacgtaagccattgaattatttcccaagtgaaaggcacttgtgctccatacggcatttaatagggcaagccgtgcatgattgggagacccattaagcatgaggtctgccaatgttgccattgcgcatggtattaccaggctcatccaaggtgtttcctttccaaggcacaaaggagagatcaacggcacaattctttctttgtagtgggataagagattccagccctcgatattgcccacggataagtagggattgagttctgcttgtagactcggttcgtggaagtccatcccaacgctctgaagtggctcttgattcggccctgctagcattacatcgtcactgtaatctgcatctagggcatctggactgaacggggtctggttcaagtcttcctctcttggcagctcctcgagctgctcaaaccagtcacccgaggaaggctgaggatctgtaccaaaaggtaacgggtcaatcgggagtgattctgggcatctgaaagcaccaaagggtccccgaaagagcgataatggtttcgagcaactgatatccgagtcgaatatttctagatcgacgattgcctggtcgggattctgatcgggcacggaggagatgagctcaagggtcatgtctcggcgttcaacatctgccaaagattgtcagaataagccgatgatagttgcattcaaaggcggacctgtgaagatcgagtggcggtgcctggctgcattccccgcattcaaccatcgaatatcctccttgtcatgaataaaggttaactgtacgatttctcgcatcttgagggctgttgttatttcttggggaagttgtagttcccacaaaggactcggagtctccgttggggataaagcccaaattggaatgtgattccgatatcgacatggtaggtatcaactccccggtctaaccgaatgacaatttattcattctataagaagtaccaagctatttaaagcgccgtctgcattatacttatgttcaatcttctgggtcgcaaaaatcagtagttggatctgagagacctaatatcgctcggaacttcttaccctcttgggctattcccttctcacgttgagtcttgatagtcattttccaacgttatcttaagctgcaactaaagattacagacttaaatactgctgcttcggattccaagttatacatgcaagacgcactagcacgttcactcggaaagacaagcattattctacaaatcgtctatacacatgtagtggaggtttgataacaatccggcattgaatctgcagggtaacttaagtacataagtatggctagacgatgcatcccgaggtctgactctggatgactgtttaggaaaacaatttggcgattcgcagattgttgtagtcccaggccgtaatgtcctcatatttgcacggggtatcgggcgtgataaacttctttaagggaagcaaggaagcgatacggttcggtttcgcaaaataggcaacagaatagcgctcggggatcatcacatcagagccaattttgacggtgggcggataggttacccggtgacatgcagccatgaatgtatcattggtcaggcgctgaagagagtcgccgatgttcagaatgatctcggactttccccctgagatgacatcatggaacttccccagattttgctggtcttccacctgtaagccaccagtggaatcttgaaacagcatggtaattgttccaaagtcggtatgttctgcaatgcgcgtggcagttccatcttctagagcagatgcagggacagctggataatgaagcagacggaattcgttttcagccttgttgtgcagtagtttgagatctgatgccgaaatatcgagggccttagccaacgcatcgagaatctctaattcgacgttgaagcagctttcatagaagtcttccatgaattttcggaacccgggaagtttctcatcagctacccagatgttgtccacaaggctgtcgtgtgaggaacccatgtcgagggtttcctgttctcgttagaatggatgttcacggcggatcatgcaggaagcacccaccttgatatcccgaacagacttcccttgagggaggcctttatcatagccactaatggaagagactgattcttggccgatataactgtatccacggttggggtttgcctcgggtgggtgtttggcggtcatcttatcctctagtgagagagagaagaattgacgggtctagtagagacagtcaatatgtgtataatcacctcgtttgtgtcaacttacatagtcaaacattttcgcaatcagattttctgggagcccatggtttttgagcttggccactccgcgcgttttgagtgtttctagtagggctgccgaaaccgcctctctttccgcgggagaccctttcaacagggacagatcaagagcttgggacataattatgaagatttgcttggaattatcgtctgttatgagggtcttcttgactttcgaatcaagaatgacaatgaaatgagtaaaagaagagacctacaacactagactatatatattcgatcacggataggacctacaagtggtaggtggccaagaagaacttcattgggaaggtaatattgaagatatgaacacacagacctgtaaattatggattaccttccattctatcttcatctttcatgatgcgaagtgtttgttccgaagatagtgtaacgcacgccaagattacgccaacaacgcgtcccccaataaggaaaacaaaatagtggatcaccttcctagtatttcatttttcaagtacaacatacaacatagagataggaaagtgctgtcgccttatctcggggactgtagaagtgtagaggtatttcatattacttgcctacgacagctaaaatttcatcccttggatctcggtgtactgttgaggaccactatcactttcctcttgccgttccaacttcataaacggctgtgtaatctcgaggctgcggagagcgagtgtccgaaagtaggagtaaaagttcatgtaggcccatttgacgaagcctccctcaaggacattcacctgctgctgaaacaagacaataactgaattgtagctcaaggcattttcaagagcaatgcgatcttcgtcaccttgattcctagaatcaaaaaactaagtcttgggctcaatgtttgcataaggtctcggataacagtggcttcagatggtgaaatattatgttggaccattttaacagccatatggttgtgacgccacctctgatacatagtttccattataccgactgccgtgaatagctcccaatatttgggaggcgattcaacggccgttagctcagtccaaagtgtcttgaaagtaagcgagttgtcggaatcgcgaactggtcggtcatggcttatcccaactagccggtgatgggtgcaaagagatttggagcgaatcttgaatttcattaccgctgtctggctttttgcgcttgcggcaggttttgtttgtgtgaatcggcatatccccccacttaattccaatgaagttgataaaatcattggttttgaattcggcatctggggacaacttgttcttccaggctgtggaaagccattggccccgttgaattgcttcattcatgttggtggcgtcggcgccgggaccaataagacgttgaagccaaagagaagacccatcttctggtatgcagatacgctctgccctgcaagcacaagacaatatcccaaacatcactgcaacccctgagtaagatcccgtagcaccggtaagcaagtatccatagaatctccatcaaattagaatggcggagaaatatcctttttggttcatactcgatcaactggaaattgaggacatcaaaagtcttcacgtgagacgatgcgaccaccagaccagcttgaaaaaatggctgtccacctgcggggtaactgtcggccagcaaccatccagcatcattgtatccccccgtgaagacatatacacctttccacgcgacaagcgtccgctgattgttctagtagaagtcagcagtgggtaatttcgggactcgttctttgcgtacatcccctcggtcgtctaagtcataggctaggtgttggatgcgataacccgcaggcaaggtcaaaagggcatagatgacacctacatccgacaagcggacgttcttgggattccacttgcactggttgatgtccacgcccacttctgcttcaatggatttgcgatcggggggatttgtaattttccaggtacggagggaggccaggtcttcctggcttgacagaatgcctgggttgaatccagggacatcgccctctttccattcgactgggttgctgcatttattctccaactcccgctgaacccatatttggcacctctgacgcaattgcgacaggtccttcagccagtcctcaatgtttcttgtggaagggcatgccatctcacaagcccggggcggggagatagatggcaccgatacagatgttagttgatgggtggtttgtaattggagatgttcccccaggtattgctgcttccaaaagggagaggtcaaaacaggtagaagactgctgtgaattggaaccagaaaccttcatagacaacgaaggagaaagtgagacgttgatgaggacgaatactgtcttttttagtgaggatatgagaagtatagagagtcacagagagagagaactaatcagatgtttgaagtgtgctttgttgacgaagtatacaacgcccaaaagggaatcgggcaggcctcgacggtcattggaccaaagctgcgcgatggccgctgcgggatgccgtagccccccaccaacaaacagcttcctgcgcatcacttcattcctctcctcacactttttatttcttttctgctttttttattttctgtaatacactgagcgttccattttttaaagtcttttcgagactccgtacttgtcatggattccacgggtctgggtagtgatggtgctgcctaccggtctcgtgggtaccaactcgaaatgttagaggccagccgcaaggaaaatatcattgttgcggtatgtttttctcttcggtgagggcttagaaaatgctgacgattgatagatggatacagggagtggaaagactcatatgtatgtttggaggtgacgcttcctttatcggcacatttccctgacagttgcttcagtgccattcttcggattatagatgagcttgaaaacgccagttctccagacaaagtgaacaaactcgtcaatttgtatatctattcttggctcacatatgtcacagcttatttggtttcttgccccgacagtggcattgagccttcaacaacatcaagttatcactagccacatcctctctgtgaaaactaaagttttaacgggcctggataatgttgatcgatggactgatcaaggtatctgggataaggtgctcaaggatgtccgtgtggttgtctccacatatgctgtccttgctgatgctttgggtcatggttttgtccgcatgccccgacttgctctacttatctttgatgagggtacatacgtggcacatctcaaggtattccagaattaaaccaatctaacatctaatttagctcatcattgcacgagacgtcatccggcgaacaagattatgcaaaatcactaccatcctactctactgaggtcaggcccaaatgctgtacctcggatcttgggactcactgctagcccagtggtccgttcgacccaaaatgagcttgagtcggtccatctactacatgatgataatcatctccagcaactgaccatgttccccctagaacgatcgaatccaacttgaacgcagtatgcaagactccacgtgtccatcgcaccgagctgttggaaaacacccatcgccctcatctcgagcgtctcaattacatacactttgatgaagcacagtatggccttggaagtcgactacttccatctctcatagaatgttgcagggcctataacatagatgatgacccttggatcgaatcattacggttaaaggatcagattgtggagctggcgaaggccctaaatacaggtaaaaccttctgtagcgagcaactgaggatcttcgaggcacgcagccgtcacatttatgaggagctggggggttgggctgccgactttttcatcagtgcttcaattgatcaacttcaactttcaatccaagatgctagtgaaatgtcacatttggaccaaagagagagaatttatcttttggaactgctgcttacgatgcctacgccagttgcagccgaggagaataatcacgtatccatcaagcttgaaatgcttctcaactatctcgaaaaaatggataggcctggcttttccgggctactattcgtcaagcagagagcgactgttagtgtgttagcgcgcattttatcccttcatcccaaaaccagagatcgcttccagtgtgccgcttacgttggttgggcgagtgataaaaatcgcaagggctgtctcggtgacttacttcatcgggacatgcaacgaaatactctcgatgaattcaaagctggccgaaaaaacctcattgtcgccactgatgttctcgaagaagggattgacgtaagcgcatgcagtctggtcatttgttatgacaagcctgcaaacctcaagtcctttgtccagcgtcgtgggcgtgctcgtcatagagaatctacatatgcggtcatgatctcaaatgaggacgagctgttgagtctccaaaaatggcaggaactagagcaagccatgattaaagcgtaccaggatgatgagcgacagcgtcgtgaagcttatgccatcgaagataccgaggagcacgtgaatgagacactttgggtggaaaaaacgaggtgagagcgatccagtgcttccccttgatattggctgacatcatttggccagtgctctgttgacagcagatgatgcattgcagcatttgcatcacttttgcgctgttttaccagttgatgagtattccgacaatcgaccaatgttttccttccaagagaatagtgtaggtttgcttttaggaacggtcacgctaccaaattcggtgcatccgacggttcgccggacaacggggaaagcctggtggcgcacagagcgagcagccagaaaggagactgcatttcaagcttacaaagccttgtattcgtatgggttgctcaatgacaatctcttaccactaacaagaaaaccagagttgcggttctcggaacagatgacgctcccatctattgtacaagctgctgagcagtatgacccttatgtagaacttgcacaaggttgggcttcgggtcagctgtgtcagacacgcttgaacatatgcagcaatggttctcccgataaagatttggccgtatgtttgattttgccaagattgacccccatgccacaccccattcccctctactggaaccccgagacttccttggaactctactttgatccgcaagtgtcgactttcgaggcgacagtggagacactcgaatatatgagaaagaccacggccctctatctacaagcccccagctcgcgccagcggggcgaagaacgcgacttcgtggctctcttcattcccgatattccacatgaatacttgggacaatggcttgcggtgcacgaaggaaaggagcctgcactggaagtttactcgaggaatccaactacgccgcctacgggtatcgtccgtgaccagtccaaattcagtgagccacggatattcaacaggtgggtcgttccggccgaggtgacaaagacgtcgcctattgaagtggaatgttcatcacttccacgccgacgaaatctcctccaggtacgaaccatcaatatcactggagatggagaggtagatgcaccaaagaagtcccacgttctacctgcagctgcttgcgtcatcgacaagctccccgcgaaacaggctgtgtttggactgttcatctctgccattttggaccggctggaggcatccttggtcgcacaccgattgaatgataccattttgaaaggagttggcatccaaaacatagaccatgtgattacagctatcagcgcccccattgcgcaggctagtaccaactatcagagatatgagttctttggtgactctgttcttaaattcaccgttagttgccaactatttttccggaaccccaagtggcacgaggggtacctctcggagagccgtgacaaactcatccaaaactctcggcttgctcgtgcagctctcgatactggcattgactgctttgttctaacaagtcggtttaccccccggaaatgggctgtaccattgatcaggaacaagttggacccctcgactgctaagaggaacatgtcaagcaaggtcctggcagatgttgtggaatccctcattggcgcagcatatgtagacggtggaattcggaaagcgcaggcctgtctccatcgcttcttgccagagattgatctcttcacgaatgagatttcgtccctcctccccccacccgggaaaggagtgagtaacttaatcaaccatcaccgattggccggtctgatcgggtacacttttagtgatcctgccatactgacagaggcactcacccacgcatcctgcgagtacgatacatcaacacaatcttaccaacgcctcgagttcctcggagatgccgtcctggacatggtggtcatggcagtgatagcagcccaccccgtggaaatggaccagggaccaatgacattgctcaaacattcggtcgtgaatgccaacctcctcgccttcttctgcatggagctaagcgcaccagacgaaccttcccacatcacacaatttgccaacggcgaagtcaaccttgtgccacactataaccagatccacctctggcgcttcctccgctcccatgggcctaacatcacatctgcccgggaagcttgtctcgagcggcaccagggtctccgtgctgagatcttagatgccctgaggaacgaaagccagtacccgtgggaattgttcgcccgcctgcgtgcggataaattcttatcggatatcgtcgagagtgttcttggggcgattttcatcgactgcgggggcaatttggatgtgtgttacgcgttcgttgaacgtatcggtctggtgtggtacatccagcgtgttatcgctgacggggttgatgttgttcatccgcggaacaccgcgcagaacatggtgaagggagcaggaaccttggtcttcaagaggaagagggtcgaatctggaggcgtgggtacgtatcggtgcacagcagtggtcaacgacaccgagatcgcgctggtggagggttgcgcttctgccgaagaggctgaggtcaaggttgccaacattgctattgagtacttgaaattgcacccattggcttctacatgatgtcgaaacgacgacttgggaaattgacgtgctcttgaatgaattttggatattttcgattttgcttggatagataccatttgagaagtcttgaattttgacagccttcggtgaaatcgtaagctatgtagctaattgacatgcccaaataaataaagtagtaaaatatggtcgactcctatgccttgtctcccttcgcaccgcgcttagaccgccgcacaggggcgggcttaggttcctcttctgtctggtcctccgcgtcagatccaatggagtccacttgttcctcctcacttgaagtcaccatcacaccctcttccgtactctcggaggaatgggtatccacgtcagccttcgacacaggctcccatgtcccctcagctgacccagtatcctgacgcaaactgctaaggatctttgttgtctcactttccacgccattccaagctccacagctgcaacaccgccagcggcccagctcttccggtgttttgatcccagggggagcctggccgttgacgagccgacacgcgctgcagatcatcgccatccggttgcggggttgggtttcatcctctcccagcagcacatccaagacacggtcataccaatttggttgttcagtgtattcgctgttctgagggaatgcgttcggtgcaaagctgggttgattggtgggtggttggggagagaaagaaggtggggaagacgactgctgcggtgtttgcggggcccgaggtagctcgagagggggagagggataattgggggatggcgggctgttctgcgatgccgagggaggacggcgaatgttggcagtgggtggcggcgggagaccagtgcgaggcacattctgtagctgctgtgcgaactgccccttctcggtttgtctctttgggctcggggaggacctgggagactcaccaccgtacttctctagcagttgctgggtggagttgtacttggtcgcgaccttgagcttttcgatggtctcctcgcgctggttttggaagtcatcaagacgacgttgcatgcgggagattcggtagtcgaagattctggagctgagagtgcgcacaccatatatcctgaagagacaagaatgtcagcgatatgggaacgtgcagaataaggaaagacgaacaggaccggcccgcctattatggctgcatattccttgattccccagctctcccatcccagtacgagggcgagaattatagagtaaaacagataggcaaatgtcgagtagagcgtccacagagccttgattcgccgggaagactgacgttgctggtcgagtcgcgtggtggcttgggcgatcttggtcgacagcgtcgacagtgtcttctcaaaagaagctgcagaattcgtatcgccctgagtaatatcagcgacagtaaagcaagataatcaagtaccatatatctcaccttccagggccaaaaagaaaccattattctacatacatagtatgcctgtgaactgggaaggagaagctcgacagttccaaatttaggaaggcgatacgcacgggccacctcaggtcggctccaactttggggagtctactaggaagtccacctaaatagggggtcattggattttgtttatttgttacattgtgcatgagtatttcggatatcattacatagattccagctattcatttttgttgagttgccctttctatgactttccgagctcagcagaccgagcagtggcagcttggacagacttgtcgacgatctctttaaagttgagagactcaaatgtctggagagcagcatatgtggtgccgttggggctagtaacgttcttacgcagctgagaagggctgtcagcgctctcaaccagcatcttgccagcaccaagacatgtctgtgtagccaaccgagtggcttgttcctcagggaggcctagagcagttgcacttgcgatcaagtgctcgaccatggcaaagaagtaggcgggtccagatcctgattgggtcagatcgatacttgttgatggccttttacgtaggagacttaccggacaatccagtgacaacatcgaggagttcttcgcggtccacccactcggtagccttgctaacacttccgagcatagcattgacaagatccttctcatctggggtaatgtcggcgccggcaaaagcacccgaagcaccctcaccaactagggcaggggtgttgggcatcacgcgaacagtgtgggcggtacggctatcgctcgttgtcaaccaccccttcaagctatcaagggtaatacccgcagcaatgctgacgacaacgggcaaagtcgcacgcggcgaccaggcaccaccgagctcctcgcacacactcttggcaacttgtggcttgaccgcaatgatgaccaaatcggcatcgcctccagcctcaacgttagaagtggtggtgcgcactccgagtgcggccatcttctcgcggttgacatcccacggctccgagacgcagatattctgcttgttgacccctttgctcagcaggccaccaatgatggcggaggccatgttgccaccgccaatgaaggccagtttgctctcttgaatggaaggcattgtatagatacagctgaaagggtgcccaggtgtcgtactgtccaagtgcgtagtcggggagtcccgcacttatgtaaaaatttggtggggcacctggacccgcgttatcgcaccggcccggtgttccaagcggttggagaagctgtctatcttttggtttctgtttttattactcattaggtttcttgaatactctttatcaccctcaatgaaaagagaaataatgcaaaatttacttgtagattggaaattaataacggggttggcttagagacactaaatggaattgaatgctttaactagctgttatggctcggttacaaatcatagtatctcaaaaaaagagaagacaaagcaaaatccaaaagctgaaaccgtcattcgtaactcgtgatagtatgtatacagggtatcaatcagtagacacgtcgtgcgtggcttccacgtccatcagtgccatgcatgcggcgggttccagcagcctagttttaagatgttagcccgagtccaagtcgaatacgagtcgtttggtccttaccttgactgcggggcgatgcgtcaagcttcctttcagcttcaacatagcgccggagaccttgtcgccaagtgagggtttgcgctgatggcgagtatgggtagattttccataggcgtttcgatgaccaaaacgactcccagtgggaccagtacgaccagtaggaccagtccggccagtatggccagtgtgatgatagccttgcatggggttctgcttcgttgtcgttatggttttgacggagcgcgagttcgcgtttcgccccttaagtctggtcatcagcgtaggctttgtggtgcgggttgttgtggtagccgggcgacgtcgatgaaacatggtgatggactgatggatgttgtatgtagtttaaatgtttgatatggaatgtataatgtatacaagtgtggtaggttggttgtatttgcagttaggtggaaatcgacgtctttaaatcagctgcagagatggccttgggatgacttgatgtcaagcaaaacgtacgccaagcgccatgtcgccttcaaagatagcatacaggagacgttgacaaagaggcgctcagccggcgcgtcatccgaaggacgatcttctctgggagtctgcagttaacttgcacaggacaggagacaaaaatgccaccaaaaataagaatacatgctattggtataagatagatcgtccttgcagatcaaaaagctagacagggatatattttctgactatgtcttaatgacgaagacaggatgagcgaccttggaagatgacgagttgaagttgtacaaacgtacttgtgttgtgagacggaggatgatgtcatatgatattgctctgtgcgcctgccaagacatcgttgtacgcactgaaagcttggggaagatcaaatgatgtattcatgctaagctacctacggataggaggtcgcctcaagtcaccttaccgaccgacccaaattgcttcgtctgcatcgctctaagttgtcccaccatagttatcgactgttcggatgtctttgacgattgctcgcttcacgtccttattcatgctaaacccaactgcgttgcagcttgggttcgtcaacgacatcagacaggtcgacagctacgacggtacaatccaaggtgacgcagctcgttggtggggatagattttatcccttgggaggccatcgctggtgggatcgtctgcaacggttcctcgacaggctacaggagtagacaaagcccgagtcagggcatatcaacatcttgttttcgatcgttcacggccgggctgtggtagagatgtaacgccaggccttgtaagcttggcctgtgtcagagtgatgtgtttccggtctgattcgatgatcgccttaaaagtcacttgcaccgctgtcaggaggagctaaagcctaagaacgatcgcggatctgcgcaatagccttataactctgcttatatattccagcttatcccatctgccacataaaccgcacctgttcaaaacagaacaattagccatagatcatgcaatggtattgcaaattaaaaataacaatttcagtaactcagagaccaatatgaaacaatgtagatagacacggattcaacacattctttgcagaaagggaagaggtcaatcatcatagagactgtatatgttgtggtttgcgaggggaggacctgaatagttacctggaccagtcggagtattccccccagtggggacgattggtggcggcgggaactaccctgtgtttgtattagccactcgtgcctggagatattgttcctgaagcggcggcgagtgaggttctgcgtaaaagcgaatgggtttttcttttcaagtgacaacgatcgctatttgtcattcacagacgtggtggggagaggaatgaatggcttcctccatattcgtcttgaaatgagtgataatgggccagaaatgatgcaaaaaaggtgtggtgaattcctattgcctcaaggtggtttggaggttagatccgaattcccctgagtggtattaaatatctgtctctgggcagggctagggcatcggccctatttcagaaatttacgagtaaggggagattatggagaatgtcgtcattgaaccgtgcgacgacggtgtacccacctataaatatgtaagggcccatatgataactaggtgagatgtatgtatacacaaatgttgagtcaatctggcaaaaaaagaccatgattgaaggcgtgatcctgtctgtagtcctcgattatgcctttctccagcggctaccttattttgcctaggatgtctattcaatatcaactaaaacatgatatgcgccgagatccgtctggttgacgagatactctgtgcagagacgcccaaatatcattgattgtagtggttctggccaataatcttgactaggagctcttatattgaaagcggctaaaataggaaagccccacccagcagggaaaatatggcggagtgacctaagtacgagccggattcatatttcgacatgggcattttcattaactaattagtttcagctgtgggagttcttacaaatatcgatattgacagggtgagatcatctgaaactcaaagcaggcatacatacatgcacttctatagacgtcaggggtggccaggtgtgaagtgcttattcacaagcacaggtatcgtgctcgactccgtgggcagcatgatgcagaaattatacgccgccatctctccgagggttctccacttcctagtacggagtcgagggaaatcccaggcccagaacccccgcactctgccaagacgcaacgtttgagataagatcaccatatgactgtcaaaaaaggaaatgcactacaaagatcgtccaaaataaagccgtccggagatagcaatggggcagatatgtaaatgcagtgaaatctgaatacggaagtataaggttgaccttgagaggcaatttcggaggtacagtactttgggcaaccaattgcgacttcagaaggacaacggacacactattttatcctccaacgcgcatcaacttactactttaggtctgtatgccgccgattgcaattctcaattggcttgtatagtatcatcaacacctgtcacatgatttatgatattaccatgacaccatgcaaaagtacctttctatatttagtggatacggaggataaaaaggtgcgtccgtggtcttttcaagtcgtaatcagtgatctgtttttcactctggtcacagtcccctagtattgaaggttgaagctgcttaaaatgaccacggacgccaaaatattggatttttctgtgagtctctctacaagcgtcatgacattgatcttccgacttatcattgctggaatagacattccataatgtgatcaataatcagttgaccacaacaacggaaacccggcatggcatcaaccctgccaacactcagcctaatccacccgtaccagtttcgacccaggatgaccttgacaaatccgtaaaggcagctcaagatgctttcaagggctgggccaagacctcttttgaagagcgacgtaaagccctgcatgcctgggccgatgccattgatgataatgccgccggattcgcacaaaccctcacaatggaacaaggaaaatcattgactcaatcattttcggaggtgaagatggcaggtgaatggattcgtggtctcatcgttattgagattagcgacaatgtcatcgaggaaacagaagacaggaagattgttcaacgccatacacccattggcgtggtgggtgccattgtcccctggaacttccctgtccttctggctgtcggcaaaataacttctgcggtatacaccggaaacaccgttattttgaagccgtctcctttcacaccttactgcgacttgaagctggccgagcttgccgccaacttcttccctcctggcgtgatccaatgcctgagcggcgatgagtccctcggcccgttgttcactgctcacccacgaattgagaaaataagcttcactggatcaactctcactggaaagcgggttatggctgcatgtgccacaactctcaagcgagttaccctggaactgggtggcaatgacccggcaattatctgcgacgatgttgatattgatgttattatccccaagattggacttctttcttatctgtgcagctcgcaggtctgcatgatgatcaagcgactttatgtccacgagaagatctacgacgagtccttggagaaattagtcacgtttgtcaagactctgaaagtcggcgagggcactgatgcggataccttctttggacctgttcagaatcagatgcaatatgacaaagccagaaacctgttcagcagtatcgatactgaaaaactgaaagttgcgcttggaggctcgatcgagaagtcttccgggtactttatccatccaaccatcatcgacaatccgccggagacatcgcgcgtggtacaggaagagccatttgctcccatcctgcccatcctgaaatggtctgacgagaaagatgtccttgagcgtgcgaatgccttggataccggattgggctcttctgtctggagtaaggatttcgaacgcgcaactcgcatggcagatcaactccagtctggttgcgtgtgggtaaacagccactttgacgtggcgcccaatacaccccttggtggccacaagcagagtggcatgggcgtggaatggggtcttgatggtctgcttgagtattgcaattcgcagactcagtggttgaagaagagtttctagtttgtagtttgtgtctagttttgaataagacagttaaatgccaacaccaaaaaattcgaaagactttgcttcagagattgcaccgtactagttcgttcgcccactttcctgaatatcggagatctccccagagaaatgtgtcaattctgagattcatttgttatcttatcacgcccctcgcggatcttttcgtccatcggcagactccgtcttgtgtttcgtctcacgtgagggtatggaatttgacgataaaaatggctgaggggtcttctgggctaaatcccattgaattttgcaattcgactaggaacgcccatcagacgattcgccatgctgtacacccatgcaacgattgtgaccgtggatgcttcgcgccgaataatcaccgatggagcaatccgcgtagtcggcgatgtcatcgtggatattggcaagacagatatcctaaaagaaaagtatacagccgatgaagagtgcgatctctccggtcggattatcattccgggattgatttccacccatatgcacacggcacagacactcctacgaggtgcagccgacgacctcgagctggtgtcgtggttatgcgagaggatttgggttctccagggtaacttcacggcagaggacgggtacgctgcagcacgattgagtatcggagagatgcttaaatcgggaaccacctgcttcttggagagcatggtattgtaacccgtcaatgccatttaataccctgagattgacatgaatacagtttgccgatcgatatggctttgacgggctatgtcgcgccgtcgaggagagtggcatccgtggctgtctaggtaagattgtcatggacattgcaaaatatgccaaagatgacgcctgggctatgcatcctggccttgttgagaaccgtgaaacatcattgcttggaactttgaagatgtgggagaagtggaatggtgcggctgatgatagaatcagagtttggtttggagccaggactcccggagggtatgagacgagactgttattgagtatcactttctaatgataaaccagagtatcagacgcactttataaggaaatgaccgctatttccaaggacaagggtatacccattaccatgcattgcgctgaggtcaaggccgatcgggatttcttcgattcggtctcgcacaccccgatgtcatattgcaaatcagttggtttgctgagtgactccacggtcctggtgcatatggttcatttggatgactcggacattgagtaagatatggaacatatgaattgatataacggatgctgacgatatcatgaagactcctttcttcttcgggaacgcatgtcgcacactgcccaacatctaatgcaaaggtaagttgtattgccatctggtttatatacggttggaacttaacgatctaacaatgtctagcttgcgtccggaatctgcagggtgccagatctgcaagatgctggagtcaatattggtctgggtaccgatggtgccccgtgtaacaatacatgtgatcttttgcaggagatgaaattggccgctattattcataaagggatctcgcaggatcccacggtagttccagccgaaaacgtgttggagatggctacaattaacggcgccaaagcactgggcttggataaccagatcggcagtctggaaattggtaagaaggctgactttgtggccatcgatgttcgaggaatccacagccagccttggttcaacccggtcagcgcagttgtttatactgcaactgggcgagacgtcgatgttgttgtggtcaatgggaaggttgtggtcaagaatggagtgcttatgactatgaatgaggaggaaattgtcagagaagcacaaagaagaagcaaagaggtagtggatagagctggattgggcaagaaagttcagggccgctggccagtggagtgatcaaacgaagattcaactttcaggatttttgttttcattctattatctagcaagtcagttcatgcgaggaccatgcctctgtataggtctatgatctaggtcatagcacattccattgctattcaagtcattaggacatgccttgcttacaacagaccacgcaacgcttcgcccaaagccataatagccatagcctggccataaggcattgaggtcaatggaatcgtcttataaaagtaaagacattcacccatcccggtgccaaagctggtattctgcaattctcctttctcatccacgtatcccatcactgcgctgatagccttctcagccacggggcggtattgggcaccgatgtaacgtttccgaacggccttgaggataccgtaggcaaagccagcggtcgcagaggcttccaagtacgagtcgggatggtcaaggagggtgtgccacgcgccggatgacgactgaagacgctgaagggcctcacactgtgcctcgagtgtatctatcaggtgaagacgaatagggtcatttggttggaggtcgagtagctcgatgatctcgggaatgacaattgtgacccagctgttgccacgggcccagcgcgcatctgcaaaattgtgtccgccgtcctcaaaagaccagccgtgaaaccagagaccagtctttgtatcgaaaagatatttgatgtgagtgaggaattgctttttcgcctcttcgatatattggggtcggttcagaagctttccgatcttcgcgagtggcataacagtcatcatcaaagtatcatcccagagctgctggtagttctctgtgatataagtcatatgctgcatgccaccgtagcgggtgcgggggagatcgtgcatcgcccactcagcccacgcatcgagccacggcaggtaggtgacattgccggtcttctcatagacgtaggcgagagtcaaaaacacagccattgtgttgatattcttggtagtgccaccctcggcaaaacgtgcagcaaaccagtcttcgatgatgcgcaacaatctctcgtcgcccgtcaactcgtagtatttccacacgccgtacagtccaattccgtgtgtccactcccaaccctgccatgactttgtgtcaataatgcgcccatcaggaagtggcagtaggaattttcctgtctcgtctttgatattgaccaagttatcaatcaacaggttgacggcgttgtgaatttgggcgcccgtaggcttaggggacgacattgtgtgatgctgggagactgttctctgtattttcgacgaataagagtctccacactttttgtccgggaaacaaaatattatgtgccggaagctccaatcctcgcaaagattggcaagagttcttccactaataagctcttgggtcaaacgccacgaagcatccccgtgggggccaagcgtgattcgggcgaaagaaggccgagttgcaaactgacggaaaaacggtggtaaggcgaatgtatatgtggcagaaaaatctcaataaattctctaactctctaaaactgacaatagtcctaaaacatgacaatctgatggacaacttagtaatcaaaacaaacaaaacaannnnnnnnnnnnnnnnnnnnnnnnnnnnnnnnnnnnnnnnnnnnnnnnnnnnnnnnnnnnnnnnnnnnnnnnnnnnnnnnnnnnnnnnnnnnnnnnnnnnnnnnnnnnnnnnnnnnnnnnnnnnnnnnnnnnnnnnnnnnnnnnnnnnnnnnnnnntgtggcagaaaaatctcaataaattctctaactctctaaaactgacaatagtcctaaaaacatgacaatctgatggacatcttagtaatcaaacaaacaaaaccatctgagttggtttttttctgcagaaaaaccagcctggtcagtcacgtgacccaactgtatcagggatggaaaatgacagtattcatcctagattctgacacaaaccatgaaaataccttcaaagtgtatttatccagatccaccgcaatgagccacgtatgttcggctatcgggctaatagatccccggattccccagcgcggggagaagactagcgtgaagcctcctcgttcgccaagaaagccggggaagcaaaggagaaggggctgactgcttgacttggttgaacggaatctgacttccggttaatatcatagacctagctaccgaaagggccacatgactctttcagcctaatcatctcacatgtagttagagcgacttctagttgggatcatgcacggccctggcaacaaaagcgcggcacattataagtccgacctatctcccctggtgaaccgtctttttgcacatactgcgtttattttgtcatggccgacggcagagatgacccccagcaggggattgagagcgtacctgttgagggaaccgaggcagtgaataaacagcacccaaaaattgatatgggagagtacgagaacaaacaagacatctcgcacgttgaacaggttctctcggcatccgacgatcttgcaaaagataacatggatatcacccgtgtggacaaggaaatccaagcatatgccgcccacagtcaggtggaaatcgacgatgccacaaatacacgcctcaaacgcatgattgatcgccgcattcttgttgttatgatttgcacatatttcctacaggctttggacaagggaactatgtccttctcggctattatggggattaaggatgacgcacatctgaaggatgggcagaaggtatggaatacttgtgaagcttttctctccatcagcatgctaaattcactcctaccggtagtactcctggttgaccacgtgtatttacatcgctgtacttatcgtcgaatatcccaccaactggatcatccaaagagtcccactcggcaagtacctgggcatcaacatctgcctgtggggtatggttctggcactccattcagtctgcaagaacttcactggattggtcattgttcgcaccctcctgggtatctttgaggcttgctgtcagcccattttcgtcactctttcctcgatgtggtataagcgggaagaacaagcggccacagtaacatactggtatgtgaatactcgtctaccggacagtgcacattgagctaatggtaaaataggtacatgatgaacggtgcccagcagattgtcggcggactattggcatactgtttcacccttattggggcagacaaggtgctcaagtcttggcaagcactcttcctggcatatggatgtatctccgttatctggggactcttcgtcatttggtggatgcctgactcccctatgcgtgcgaagtgcttcgccgaggaagacaaacgtctcatggtagaacgtcttcgttccaatcagacaggtatccagaacagaaagtttcatgcataccagatgtgggaggctttgtgcgatccccagatgtggtgctactgtgctgttcaaatattcaccaccctccctaccagcggtctaggtgcattcttcagtatcgttgttttgagcttcaactttaccgtattgcaaactcagctacttgctatggtgctgggtgcttatattattgttgttctgttgtcctctgcatggctggtcaacagattcaaacagaatacgatcgtgatgttgtgcttcatcattccgtacgttttttccctttgttttgctgcgaggccagactgacggttcacaggtcttttatcggaactatcgtccttatgacggtcgaaaacactactctgcccactaaggtgggccttctgattagttactacattactctgtcattctggtcggcccaaactctcacgttatctatggtgtcgcgaaatattgctggtcaaacgaagaagtccaccgtggtagctgcaacatttgtgtcatgggccgctggaaacgcaattggtaagtatctcagcttccctgtggagcagtttagttcctagctaacagattaaaggccctcaagtgttccttgacagggatgcaccacggtaccacattgcatggagtgtccatctggcttgctacgcctgtatggtttccgctgtcatctacctacgcttccatctcaagcgcgagaacgccaagaaggataagctgttggctgaggcaggtctcagtgccgcagatccaaccctcattcatgcattcgaggataagacggaccgggagaatttgaacttccgctacgtttactagatacgcaatatatttgcgttcgtgtgcaaatttcttctaggcttacttgctcggcttagttttgttcaattatatcttcaaaaattgcattctagacacatttcccagcatcacacaaatagaatttcgaatgtctcgatttatagtatttccggcgtatttagcggagaattgtagggcggtggaaaaggcggtatgtagaagaagccaatcatttcatggtcccgatttggccgttgccccgtactacgagttccaaggtccaattaaagctatcaagccacctagtactccgtatgcacctccatctacaatccaaacccagagccccgcagtctataaacaatcatatcgcatgattagacagtctatttgaccttgaacacatttcgaacttccccacgtggaaaccccttagcttgaggttgtcgattggaacctcccggcggaaatgtgaagccgatggtaaatatgtcaacgcggcaactcgcaagactttcacggagttattacctcactctcggtacggagtagttttctccgtcttggcgctagatcaatgggttcagatattactatgttgctcgtggaggtatcggtatctcgcatccatcatttttcccttgtctttcacccagtcgccaattttcgacaatgagattgatcaagaatgaacatcacaaattcataatggagtaacagggcttgaataataataccctatattctttcgacggcgcatctcctaaactagtgccaagggcgactaccgacactccaaaccggccagtgtgtcaggttctcttccaaaacaaccacagcttcatgcgtctgacctgacccctggttgcattgcatgattacttcttcttgatggatatagatcctgagctatctcgacacggagtcagcgcgaccccgctggtggcgttgtgactccttgcgaaaataccccttggcttgtccttctccgtgcagaatgatcactttggtcctaaatttgcgtatagtgtatccgattggtctttattcctggtactaatgaaattctcaatccgagacagattagaggtattgaccaggagcacagcacatgaaaccaagttgtactcctttagatcactataaatatgaccgtcttctgctacctaattcccactcaacgcatctatttctttgagaatccggctttttcaatctgcttattccaataaatccgcaatgtatagccttctcggctccgctctgtttgtgtctctcgttgcgggccatgggcacgtcaccaacatcgttattaacggtgtctccttcgatggatgggacataaacagttatccttatacagactcgcctccagttgtggtggcttggggtaccccaaacactgccaatggtttcattgctccgggtatgttattctattattgtcctctttgaccaagaccaatttcctttctaactctgcaaatatagatgcctacacgacctctgatattatctgccatctcaacgctacgaatgctaaaggtcacgcggtagtagctgccggtgaccgagtctttattcagtggactgccgactggccggaatcgcatcatggaccgatcgttgattatcttgctagttgcggcacgagtggctgtgaaactgtggataaaaccacgctcgagttcttcaagatcgacgccgtcggactgattgatgacacaaccgttcccggtacttgggctgatgatcagctcatagcccagaactcgggatggatggtcgagattcctcccaacatcgcacctgggagttatgttttgagacacgaattgtacgtaaatcccactcatttctcgaaaaagttgcgctaactaaccttgctgtgaaggatcgcactccatagcgcaggcactgagggtggtgcccaaaattatccccaatgcttcaacctacaaatcactggctcggggtcagatcagccagcaggtatcttagctactgatctgtacaatccaacggatcctggaattctcgtgaacatttacacgtctctgtcaacctatgtgagtgattaattggcatgatggtttgctgagatttcgcactcgcactcccctgctaatatcattttattcagactatcccaggaccaactctttacagtggtgccgtctcaatcacacaaaccacctctgcaatcaccgcctcaggtacacctgtgacagggacgggtgttacgaccggcggaaccactacaacctcaacctcaacctccaaggccaccaccacaacgctagtgactaccacgacgaacactacgagcgctatcacgacgagcactaccagtgctaccactagtacttcttctgctggcggggacggagcgtcccagactctctatggtcagtgtggaggaaccggttggacaggagcaaccgcatgtgcatcgtctgcagcctgttcttcgatgaacccgtggtattatcagtgtcttccgactgctgcttgaattgatatggcacaatgctcaaataaaacctgtcgcggaatggtgtattcaaagtatgagcagaaaatgattgcaactgataaagcctatatagttgacgcactatcggctagggggaagtactctagtagttagaggaagatttatctaattactttggacacttgtaaccttgtcatagtattctattcgcattcactacctaatggtttatgccaagtaggcgacagtaagcagttcataacaactctatcttgaacacgagctagctcaaaacgttgcctttgctaggttggaggcaaagtttccgtcgtcgaagggaacgttcgctgctccaaaatcagttgtatccagggcatcttgcacgacagcttaagaatatgttagattgcgcttccagaagttgggggtatatttggataacttacttgacaatgattcccaggcaaccaacggctgtgtgccgcccacagtggttgtcaggccgagagaatgattaacaggccagatggactggtacttgatcagagaggcggtcccatcaagcgtgtagccatctgtactgcagttccagtcaccgtgtgctgatggacagacggccacaatgttcgatgcagtggtacttccatcactggaaagccagataataacaccttcccaatcatggcgatggccgagatcagtcgaaggcgaatccttggggaaataccaggaatacatcagggcatagtagttgcctgaagaagcgcctctcactgtaaattgcaaatagaagcccgttagtcaatgtacccagggccaggtattcaatagatacttctggagaaactcaccgtatatctgccctgtgctcgtactgcaatcgccatttgagcttcctgttgggctgaggccggcgctacatcacagatattagatatgggagtccaggagatcgttaaagaggagattaattatttcgctcacttggtgttcccttctgcatcaacggccgggaaaggcacgcagccattgacaacataaagctttggctggtaggccaaatagaggtcgccaacggcaccagctggaactgtctgggggaatccgacaattgcgtcggatgcaactgttcctcgacgtgtcagctcaaccgggctagccgtcacaggcagaacagtgagagcagccagtccagctatcagttgaggaatcatgttgaaattgaaagcaggcatgctaagctcgtgctatgagtaaactggtttccttctaaatatttatattgtacatgtgatattcatccctttcgatcggcatccgggccactttcttcaggcagtttagtccggtggaaacggtcttcagtcccaatgcagcttagtgagtgataatagagtctgtcctaaattatattgttgttcgcccgtgggatcgacaggcccggtgattcgtttcgttacgtctctccaacccaaaaaatccacaccccacaagctgacgcaatttatctgcttgccaaacgggtatctatgcttaattgaagctagtttagattttagtatatagtagcggtctttatgcaccttggcagagatctaatattctcttgaacaatacaccatggctgaatataacacgtggtgatgatcgacatgatcggcacgttcttggcaccactgtttttttacaccaatcacggtagacaagtcaggaaattccccagcttcttcaaaacaatctcctgcatctcagcgtcggcatcgttcttcgaagctgctatccccactgagacacttgcatagcacccagacgctagggatacttcaacttcgcttggcaatctcgatttgccacacgtggtcacatcattcggagtaagaaatgggactgcgatatggatgcgggacagaacgaaagagaaatcggccgggcttgtgcattcgtcggaaacctttccgaaattgacgttcagccagacatcatccggcaggtatggtttaccagcagcaaccacctggttagttaagttggttgccaaatcggcgtagacatcactgtagtgaggccgcgagctttcccacgaagtctgagagccactagcaccggagaaagctatagctgggattccctcatgcgcagcgtaggtggcagcgcccactgttccggagaagtaaactgtgaggccaatgttattgccgacatttggacctgtgacagccaagtcaggggggccgttgaagaatttaggggcacgcgtattgatgccatattggattgatgtcaccgggtagctattgacataacccagtcggggctattcaagtatacgatcagtctaccgttctggtaacagcggtgacgatactgacctctgaggaattgaatcccacggccgggctgccagatgggcagctattgaactcgcatggctcagtcaagacagttggctctgcttccattgaccctgtagtggcgcgtcaataaaagggcggaatgtacggagtagagaggtaggcataacatacccttgccactctgattctcagcgggtgcagataccacaactgaatggtctgccgctcctagggactcgaatagagcgcggatgttcacttccgcccagccgtcatcattggatgagatgatgttgaccgcgctagcagccagagggagtatcgcaagaatatcgaaccgcatattcaagacatccaggggcgttgatacagtgtagaatccagggggttgtttggctgctacttgtcctcctcaacacgtgggttgtcgatcttactggaaacctcggaggaacctcgggatccgccaactgccgtagtcaacggctcaatccgcaaacagacgaacagaaattgaaatggtagatcatgtactctgtgacgtttgaattcagcatcgaacatttaaataagtttaattatggtggtgggacgatgtagacgaaaatcacatccatgaatctcgaaatatatactgcgcaacctcagctccgtaggccaactgaccatcgactatcttacaacacagcaagtggaaagcaaattggttacacaagaaacttatcgtgtaaatgtacctctagaagttgaaatttatctatggatgatgccgacactaacttaaaaacgccctatggtcggcttggtcgccatctctcattcagaacgagcactcttagtcttcttgctcctcagcttcatcatcaaaaataccaaggcgtaagatgagatgcaaaatagggcagtgagacccgtctagaagaacgattagcatcgcaatataggctagataaagcagggtatactcacatctctccacgaatagtatttctcttgaagattgaacgacttcgcataatcggaaccttccgaatacggacagaaggaacacatcccagtcgaggtctcatcgtctaggtagccagtctgtgaggcgaggaagttggccatgtattggccgcaggtctgaccagacggtgcggtgaactgcacaaattccgatgcttcgcacttgaccttgacatcccagatcacttcgccaaatagcccaccaaccaagtagtggaaagggtccaggtagtaaatccagtaacgccaaaatggctgcataagggagtaaggaaccaccacgccacagaaactcaccaggccggcaccaatcaggacggggttcatcactgccgcgaaatactcgttcggtgcataggccgcaattgcctgaccaatggatgtgtataggagctcatagactgtcttgatgttagatacttggacaaatgctcgttgaatacttggtgtatcttacaaatcatctgaagatagacatgcccggaaacactggcctccaccggaagcccggctgtgaagtaccagcatgcaaaatatagtgtggcgcaaatgataaggtatggaatctccgtcagggtctgtgctccaatgaaggcgctccaatgataggttttcgactatatggacaccggggttagcgatacttgcacggcagtaggattccactagcgcactcacctttttctctcgggtctcaaaaatgtcacgactatgcaagaagaacggctgcatttggttgatacagcctggggcgacgaagatgaagttgaaaatggcaaacagtctcaactgcagggagaaagtgccgtttccaatcttccagaaggtgaatccactgaaaagtgctgcgaaaatatggagaaagaccttgttccacatgtaatcctatatgaaggtcagcatgtgtgacctggtttgtatgacattgcagcaacgtactggtgaacgccagatatgtatgctgaggcgcttagaaaccgtcttgaattggaaccagtgtgaggtcgcaaaatctgcagtatcttcaacatattcggaatcatctctgctgctttcgttgagagcatcaagttttgagagtgcttgtttgcgctcttctgactggttccagatttcgatccaatcttgtttttctgcagtaccaccaccttgaacgacatcaataatgtgctctgctggattggcatcgggggggcatggcgctccgttccgggcgaagtagtccaaaatcttggttgactccttgccagctataaccacaaacgagtcattagttgcttgatcatgaccaatcaccccaaaagttaaaactcactttctccgaaatatgtcatttttccgcccttagctagtaggagaagaccgtcaaatgcgtcgaataatactgcagatggttgatgaattgtacactaacacattagtaagatgaaaatatgtttcaagttattcagaacttaccaacacggcttggccgccatcgaccagttttcgaaggaaacgcacaatgttgaacgcactttgcccatcaagaccggaagtgggttcatccaaaaacagcagtgtgggcttagcaacaagctcaacgcccagggtcacgcgtttgcgctgttcgatgctaagtccagctccgggtactgtgaataatcagtatagctgtgcagtgaaatcaagacaccaggcgaacatacctccgattagggcttcgctgatatcacgcagctccagaaggtcgataatatgttcgacgtaagcgatcttttcttcgtgtggaaccgtcgatggctggcgaagaacggccgaaaagtccaatgcctccttgacggttgctgtttcgagatgtacatccatctgttcacagtaaccagtagttcgctggaagctgattccgactgggcggccgtcaatcaagactgatccgtagatttctccgctatccttgcgctgagcaaggacatccagcaaagttgtttttccggctccagaagctcccataagggcaaccaggtttccaggttggacaaatccaaacaccttgctcagaagctgtttcttctcaccatggaaaggtacatgatagtcaagatctttccatgtgaaggttgactgcttgaccgagcctaaaagtgcgccagcatctgcctcctttggcttctcaccttcttcctttccacgagtcttctcactgccacgcttgtaaagtagaacagatgatccactttggctgttccggagttcaagcccgcaagaagtcagaaagatgaagaaaaaccaaaaaccaatcaaaataccaaagcttctccagatgtgatgcactgaataactgtattgctcttgaatgtattttgccccatcaataataccttcatcgtcacttccaaggactgaacatccacggtgtacagacactgagctggagtatccggtgccgtatggaagatagtcgggctctatgcaagtaaatttgcgtccaacaaattcattggccatgagcgcttcgaatgcatacgctcccggattgaggtagaagatccaacggaaccacacatgcattttatggaaaggaataaggtatcctgcaacttgtcagtttggaatgcttcgtatcaatgctgttcaaatactgacctccatagacaaagaagacggtggacagtaagccggatactttagatgcatttccaaactgtttgcacacagcgccaacggctcggaataactgtacaaaacacaatgtctgtgcaatgacaatgatccaaaatgtgaagaactttcctgcgttcatttgaagagcagccatgaagtaaaggatgagcgagaagcaggtcacctggaacaccacgactgggatatcagtgatggcgttggcaatagcgaaggccgtaggtcggtaaaatccgaatcgcttctgacgagaaagaattggccggcccatgaaagaagcagtcgtttcagacagactttcaaggagaaaatacaacaccggaaagaagcaaacaccgggtcgtaagaatattgagctcgaatccttgtagtttcaactgtcagccaggtgttcttgggtcgtgtcgggtggagagcttctggattacttacttctgccaagttatagaataaacttccacagactagagcctgtattatagctgacccgactttcacaaatagcgacagtttatcgccccagataacctgaaactgacgaagagcacaagcggcaatttgatcacagagattggctgtgtaaacactgttgttccgaggaatatgctgtttgcgcttttcactagatactgccgtctcaaggtcttcggcttcgtagctcagcttctgagggtccacgatagaatttatttgatctttgcagattgagctgttttgatagcagatttcgaagtcttccggtgtattgggcaccttctcttcccacccgggtctaactgtacgttccgtaacgacagtgactgatgtcaggaagtccgcgacatttgcgcccttggggcagatgaatccaaggtcttcaaaatacttccttgcgatacggcgagggccgtagtaagtgacacgaccttcagctaggacaaggaccttgtcgaactggtcataaataccgtttccggcttggtaagtagtcgtaatgattgtcttgtcgtttcgatccgcttcgcgtctgagcattcgagcaaattccacagctgatttcgaatctaatccccgagtgggattgtcccacatctggactggactttgcccagccaggacctcagcaagagaaacgcgcttacgttcacctcctgacacgcctcggatatactcgtttcctactaggttcttcttggtgtgtccgattcctagtgagtccagaatctcatcacgatgattctgcacaaagtccttgcggttccttaggtgctctgggcgctcattgggaaccttgtttcgaagggcgaatttcattgtacggttgacagttagggttgggaagtgaacgtcgtctgtggtgcagttagcattgagctcgatatatctcaagtgaagattgcatgccttcgttgttgaacatgatctgctgacggaaccttttggcagcttcgtgatccatgctcccgtagttgacttcgccggtcacttcatcaaaactatcccgatcattggagaggactctgagtagggaagtgcatccagagcctgggcgcccaagcacgagaagctatattgattagttacaacgttcctattctcgagttgtgggagcataccatttccccaggcttgatctgaccgacaacatctttgaggatcgtctagaaatcaagtcagtataggataactggaatcatagtaaagtatgcccaccctctttgggcgggcgccacgcttgaacagtgccccaatctgtcgcgggtccacctctgaccataaagtgcttcctaaagcagcctcaggtgccgtaactcgaacgttaagatcgcggaaggtgactgtaagccgtttgcgaatctggtcatcgccgtgttccagatcaacaggggttgttgtgccggacgatggagtttccatgacggaggtctgtattcctgaaatagaaacgaacgactacttgggatcgcaccaattaaagtgggattggagggaaataccatgatgtcgaggcgcagcagacagcagaactcttatattgcgcatcttattatggcatctatgcttttaaatccatattgccgagagtgggtcttgctaacagatcacatcaagcatgtatcgctgtagcggaatttatagataggggaaatgccttgaaacagctaaaaaactgcaagtactattgtgttagcgaggatatcactggggcgcggtgctcggaaatatacgaacggatatatgagcgacccacttggtcagcaacgatcgttgattcgctgattttctatctctgcgcctttcagagcttccagagcttcaattagatccacccttcggatatagatccacttgcaccggtcaccgatttctaattccgtggatgatccccctgattgagaccaaatatatacagtttgaagaagtcgtattctaggttatgaaatttcctggtgtgaggcccatcagaggactggggcagaatttgactgataaaccgaaaaaaaagcatccaggtccatggtggagaaatcgaaatcccagcccatgtcagactgagtaaaatcaagcaagtcttccccggagcccgcagagcctccggtcgccggattttccagggtttccacctgtgggaggttccaaggagaatttgatatgccaggccgcattcctattgacaggttctgagggattgggggggttttgggtagtaatcgatgcctgccgtcagaattgagcccttgctgtatggctgtccctcctgggggcgcaatgttatccccagttgttgctaatagaggtacccattcgtacgatgggttgatattgcgaagcacagtctgcatggctgcaattgtgcttgcgatcgggtccccagctcgcatagttgacaaaatttgcattgaagcataaacccatggcaggtagacaggcgcgacattcgggttgtgaatgaactcatagatgagagtgaataccgaattaccgaagaagtacccatggtatcgtaattcctacgataatgttagtggaacttttataacaacattttgtctatttaccagaacaagattattgactcttgaagcttcacataagtgatggagtgttttttgggcagcagtgatggcatggttgcaggcttcgttgagccaagaaggtgtttctctggggtaatttgtgacatgggtgctagactggttgagtgcgatattcctctcgcgctgccaatggccgcgaaatatcaagaacgggcgaaatgtaagaagtagtgtatgatagtatactagctatggtcagagtaaggtcaaaaaagtgccgactattcacttacaggtaatgaaaattgtttgtcgaaccccaagggatcccgcctggatgctactatcaagaccaagacccaaagcttgttgtagatgtgcttcatgaccacggatgtcgtccgcaatagaccgagcaactctccacatgtgcagaagagactcatgccgctggccgtatatctcagtaacagaacgagtgatggtcttgcaaagctgcaccaacaatcgaataaacggatcctgtggatactctattgcgacatctttaagagagatagagctaggacgtcccacatgaaagcagaaccagctatgtatgaagttagcgagttcatcaagtatcgaactgaaaagggtaatttacgtttcgtagatgtaaagagaccagaaagttacccgtcgttcttctatgttttccggggtttgatcaacatcatggggaacatccttatgcaaacctgctgctaaggccttgcgagaagcagaacccaaatgtaggaaagctgagttgggccgaccttgttcattctggtaattggcgtaaaatccatgtcagtctgtaaacaacaagaaagggtgataagaacttatcatatgcaatgagatttggatagtctgaaggttcaccacatcatcaatcgcggttaatgaagccttgacacgctcaaacagcacatcaccccaggcaaaatgatccgtgccaagtgccgcgcttgccatggcaaggagaaggatcgcttgggcgaaagcatctagatggtctgtgggcgaagagttgtagagtttgtccagacattgctcataatatatctttgggcgaagtggcatcagatgataaaggctggagagaaatcgcgacagaaaaagcttagccaagtcgtacggcagaaacatcatagacaaatctcctttcccgagggacttgttttcatgaaagtctggtgtcccgaagaaaatgcgacgaaagctgaacaaatccaacccagctccagcctcctcgactccgccagagggttcaggctgggaggcaggattggagacgagatcccggtagatatgctgcattagagagaaatgagatgtggggccatagtatagctgcatccgacatgacggtgatgccatatgtgtcgcagaaacgctatttgggaagtcattcatgacggaggctgtgcgctgcggcactccagttggagaagcttgacgaggtgaattcctctcggtggcttcctcattctcatgtttctttcgcctgtggcgaatatagtctctgtatatacagggtgtgttgcgcagttggcaagttttgcacctgatgttatattagccatgtattcactatccgagcatagaccaaaaaatctcacggggtcaggccattgcacttgattttacgtttgcggcattcttggcatgcgcgagggattcgccaacctgcctgagctttatccgatgcctcagacatgaataaatttgtatgcaatctcacacctcctatctgtgcagttcatccgtttaatccgagggattatccgtatatatccgggtcacgtggtgttatgtcatcaagtcagaccacggcggtgtatctattccacgtctgcgtacgttggagatcaaaactagttctctccctgataagttatgtcgaactccagaagtatctccaagtttatgatatctgaatttgcgctcttatatcacatgacctagcaccttgtaacagacgcatctaaatccctactcgaggtcgtcctaagacgtcgcgcatgaatcactatctagtacggagtactccgtacactcttgaaaatagcctcaactcatccgatgcgagcagctttgggacagcttcgggacaagttccgatcggatgacatctttccgatgcatgtttcttgcaagactcggggttatggacgatcacaacgcctgaccaattctggggttatggttggtcaccacgacgactaagagatagtcagatgaggggatcgggatttcccgtacgaagtgcctaggctgtacctagactagggcttataatccattcggataaccccacaaagccaatgatacaatccggggtggatccacaagtctggggaaatctcgaagtcatctggggaaattccaagcgtggcttaccattgatttaatttcgctcgaaactttagatctcggagactttggcgtgctaacaatttttatgattgggtcttccactgccagttctgactagcaaggcatccctctcccactgggagcggcagattgggatttcagctgctgaaaaagccgaatatcagttcggaattgaatccgtgataccccacaacactagactcatcatctagatcttcggacctatataatacccggtcgccccctatgtcttccgtgatccctgtcatctgaaaacttcagaccgcccttttaccccttccaacctcaatccactgtcaggtactccaacatggctgacgccgagagaggcaccacgcctattggtgacgaaaaggtcattttagaccataaagagtatattatgggtgaagtcacccatggtgcagcagaaaagggccaactcgcgacagacgaacatggccagcccctgctaaaatttgacaaggccgccgagtcacgattgcgactcaagattgatttatatattgtcccaactgttgcaatcctgtatctcttttgttttatcgatcgagccaatgttggtatgtaaccaaccccggttattattattatatcccgagttctatgtccagttcaaacactaatccgtttcttttctggaataggcaacgctaaattggccggtttcgataaggaccttggactcaagggctatgattacaatgctgtgctctcgatattctttatctcatacattatctttgagattcccagcaatctcatgtgcaaatggatcgggccggggtggtggctaccagggatcacattggggttcggtatctgttcggtcgccacggcttttgtcactgatatgcgcagcgcatctggtgtccgcttccttttggggtatgtgtcctagagttcgcaaaatcgacaatgctaacaacctctcccttagcatgttcgaggcaggactcatgcctggaatcgcatactacctttcacgttggtatcgacgaagtgaacttgccttccggctatcattatacatcgtcatggctcctctcgctggagcgttcggtggtcttttagcctcgggtattctcatgctagatcattttggttccctccgcagctggcgtatgatctttgcgattgagggtatcgtcaccattggaattgctctcatctcattcttcacgttgaccgaccgacctgagacagccaaatggctctcccaggaagagaaggacctagccattgctcgtgtgaaatccgaacgtgttggcgcgaccgaggtcctcgacaaattcgatgtagccaagacactgcgtggtatcttcagcccagtaacaattgtgattggggtaatgtttatgttggacaacattaccgttcaggggcttgggttctttgcgcctactattgtcaaaaccatttaccccgatgccactgtggtggctcaacagctgcacactgtgcctccttatgttgtcggcgcgtttttcactgtgctgttcccctacctcagctggcgatttgatcatcgcctaatctttttcattatctgcccgccgctaatgatgaccggtaagtctcagctccttgagcaaccttggttgcaaagcacaaggattgcagggtatactataccaggttccaggctaatcattacggggattgttataggttatatcatgttcctggctagcgaagccagcatggtccgatatggggccacctttattattgcgtgtggagcattttcctttgggtccctatgtcctgcaatcgcatcggcaaatgtgatttcggacactgcgagatcttcggctattggaaccacggtgatgttcggcaatatcggtgggctgatcagcacttggtcgttcttgccttttgacgggccgaactaccctattggtaatggtctcaacttcgcaacttcaaccgtcattctgcttcttggggccagtctatgggcatatatcatatgggaaaaccggcgccgtgcgcgtgtcgatgtccacagcgccttggcgggactttccccccaacagattcaggacctggactggcgcaatcctggtttccgcctgcgaccatagccaggttctatacctcgggtaatcgattttgccccggttcatgaccttagaactcctcactagccttcgtctcgaacatacaatgaattattggcaaagacataggctatctgaggactccattggcgttatacgcgtaaaattctctagatccagaattcttcggttcatttgagcagccgaagaatgaaccaaatgttctagagctgtacgggtcttacttcaaagatccgtggttggcagacttgaataacgaatcacaacaaacatatttggccaggaaattgcacatggctcaaaggattgccgatcatgtcggtacggtcttgttcattacaaaacacgcgaagaataactagaggctttggtgatcggcgtgtccaagcgcaccccacgccaaggaattcgtctttctttcttgttgtggtggtctgtgaaccaatcagtggcttcaaatcattcatggatggggttttctctagttttcgccccgcgataaataagccacgtacggcacagacattttcatccggacgttgtccgaaactcactgtcaaggttcgatggaggaaagaatagacttggcagatcatgtactccagtacgtcctgcgtcggagtagaatgtcaagagtatctgggaatgaacatacaagacaggaaacaagcgagccaccgtgaccctacagtgctcgagggaagccgcacatttcaatccaagggaacatgtggtgattcaggaactcggccatgttccgttgagatatccctggaacgagaaagacggcaacttcggacttgggactgaagacgcaagctctcttggcgctgttccccgggtcttggcttgtcccggtgtatcatgtgtatcatgtctcaccagtttacggctcatttggactacggagtacagggatctttcggtcttgacatatttctcgggctgggatttccggtccccagatttccccgcatgtcgtgggaccaacatctcatagctataaagaccccttgctctggctcacgtttgctttttttcctcttctcctactacccccggattatccccgtattcaactacatacttgagtgttgcccatcatggctggcggagcaaagaaaccagtcaatatattccgcctcaaagacctgggtgagcccaaggaggttttcaactggcgattatggttctcggtcatctcatttggcctgatgggcgctgcccgaggtgtcgatgaggggttgatctcaggtgccttcaattctaaagacttccaacgttacatcaactatgactcgtacagccaagtggaacagaccaacatcaagggaaatgtcactgcaatggtccagattggatctgttggaggcgctcttttgtgggttcttccttgatctttattatatcggatctcgtgtcactaacccggtctatttttatacagtgcgttcttggtctgtgatcgcatcggtcgtatctgggcaacccgccaactttgtgttttatggattgtgggaatcgctgttttcatgggtaacggtggcagcttaggtgctgtctatgctggtcgctttattgctggactcggtgtgggccagacagttgtcgttgctcctgtatatcttgctgaaattgtgagttgctcattaccccagtaatacatccatatcaactaacgaagaaaggcccccgcttctatccgtggtctttgtacctgtgtcttcacaggctttgtctatctgggtattgtccttgcatatttcgccaactatggttgccaaatcaacctcggcgacaacacgcacaaccgatgggtatgtgtgatccactccgtaccatatattatcaatactgactagaacagctcgttcccacgagtctgcatattatctttgccggcttgatattcctcctctccttcctccagcacgaatcaccccgatatctagtcaaacgcggccagctcgaaaaggccatctccaatctctcgaaaatccgtggcctaccatccgacgatgaatacgtcgtacgcgagatatccagtattcaaacgacacatgcagctgagatggaggccacaatgggttctggcgctatgggcgtgatcaaggaaacattccttgtcccatcgaacctctaccgagtctacctcacattcatggcccaacttctttcgcagtggtccggagccggcagtatcactgtctacgcccctgatttgttcaagttgctaggagtcacaggcaataacgagtctctcctggtcactgctgtgttcggaatcatcaaactggttgccgcaattctctgtgctcttttcttggttgatgttattggacgcaagcgagccctcctccttggtatcaccctgcaagcgattgccatgatctacattgccggcttcttgacctccgttcccgaaatgggagtcgacgagagctacaaggtaccggctgacaagaagagcgctagcgagggcgccattgcaatgatttatctctctggctttggatgggctctcggctggaattcaatgcagtatcttctgactgcagagctcttcccactgcgcatccgtgctctttgcacttctatggccatgactctccactttgccaaccaatatggtaatgcgcgcgcagttcccaatatgcttctgcccgtcgcagagggtggaattgaccccaagggtacgttctggtgctttgctgccattaccgttatcggtggtgtctgggtctggtttagtattccggagacggcaggtcgctcattggagagtatggatcgtctctttgctttgccgtggtacaagattggccggtatggtaatcgggatgccgatgaacgtgacctggtagtggatgagaagatggagatggcggtgcagacgcacggaacggctcaacatgttgagaggcaggacagagagaaccgagtctgaatatcatctagatatctctagtattcatttgctggtcatgattaatgaaactaacatcatgaataaatcccttttgaaatataacaaccaactcttgccccattagcccgctgaaatacgtgaatagtgcttctgttcccgccttatttcgaccattccttcaaccccgattgtcagaattccccgttgacgtcggcccgtctagcggaatgatcacaattctcgccttgagcgcagccttatcccgagacttcctggtagaccgtgctgatccctcacttgtgcgaatatccatatattccatatcattcaaatattcatccggtaaatcgacccggatcagaacacccctaggtccaaagaccgtctcgttccactgcgaaatatgacgagcaagatgctcaccacgagctccagccattgccgagatcagattccgttgttctcgtcgattcctggtgaggcgggcaatgaatatcgcggggatagcgcccagaatgccgaccatcagtccgcccactgccattgtgcccaggcctctgccaatcacagtggtccactgccgacgtgaaagcttagcttcgtcgcagactacttgtgtgaactgcgcccaatggtctttggagatgccgtaatgagagagttcgtctggatactcgaatcctgatgtgcaggcagcggatctggatggtatttgcaggcctcgtctcagagcagatgcaacagcaaacccgggctcacttttctcgggcaggaagattatgggattgtcggtcttttcatcgagggtggaattgaattcctcggacggggaatacatcggtggggcatcgtaatgtccagacgtgttcatagttggtgaaggactgtatagatacagctagtatttcttttaatgaagttttcttcttccacggggaaggattgatttgatattgaatgattttccgatttttgaacattaaaaaagggtcaccatcgcaaatatttatatttctgcttagccaacattcccaagcctcatttttctaagcaagcttttccccctcaggtatgagtccgtatgacttggccagacaccgcggcggtgttgggaggcttgtttcggcactcggagccatcaaaaatagctttcaaattggtgatgccttgtataggccgcaatattttgcgttcgagtcacttttgggagaccaatagtgattgcacgcgttacgagcaagggtccagatgcggtcatttagtacgaagataaggccgaactagattctcagtaattaagagtgaggctaaatcgaccaatagagtaatagtcaaccccgagatatctcatttccttcgtatgtctatactccgagctccgcgtgagtcacaatttctcacaaaagggacgtgcaccaaagcaaacaaccccctgagccatcaaggcaccacctttctccccaaaacttcctcaaatcacatcatgacaacgcgttatagggttgagtgtacgtcatcgcgtcttttttatctcgctgccctccactaacgtctcttagatgccctcaaggtacggctatctccgcaagaatatgtgtgcccctcactgacccatagccatgtagacccatcgccgggatcaactagtaagtcggtactacatatctaaagattaaagagtctgcctaacaatctgcagatcgaatggatcaaagtatgtcgctcggtcatgtcgtattcgccgattctaatccctctagggtctgctggccgtcccctttgtcctgcattcccagcccacggcaatctacaaggacaacggtgaggtgctgaagacagtcgcggccgacacccaagttcgctatgcagagattatgcgagatgtagagaatttgatgcttgatcatagtaagtggggattagaaaccaaagaactcggggatgatccctaatcggtacttaaagtccaacaccatgaacgcaatgcccccggaaaatcgaaattgaaccttctggtgccgtcagtgggcacttttttcaccaagctatatctggaagatgccttcaagtatcaagatcagcagcgattcatcagccgacgacgcttcgtggccccttcattcaacgatatccgacttattttgaactccgcccaggtgctgggtcttgttcgctccagcgaggtgcaactagtcacattcgatggagatgtaacgctctacgatgacggcgcctgtctcacatccgacaacccagtcatcccacggattttgcgactccttgaacaagaccgcaaggtcggcattgtgaccgcggccggctacaccgacgcaccaaagtattacgagcgccttcagggtctgcttgatgcgatgcacgaatcaactactctcaccgcagatcagaaacaaggactgattgtcatgggcggcgagagcaatttcttattccgcttcgacccgacatcaaatgcccgactaacctatgtgccgcggaatgaatggttgctggatgaaatgcagtcctggagtggtgatgatattaccgagctccttgatattgccgagtctgctctgcgagcctgtgctgacaatctcaatctgccggctgctattctacgcaaggatcgtgcggttggtgtttaccctgtgaacggtgtccgaatcagtcgcgagcagttggaggagactgtattggtggtgcagaacacgattcaacgttcggctgttggggcaagattgccattctgtgctttcaacggtggcaacgatgtcttcgtggatattggcgacaaatcgtggggtgtgcgcgtatgtcagcgctatttcggtggcatcgatccagctaaaacactgcatgttggtgatcagttcttatcagctggggctaatgatttcaaggtgggaagactatagaactctccttggctactggtcagactaacatttcttctgattaggcccgtcttgcatctacaactgcctggattgcaagccccgccgaaacagtggagctactcgatgagttggagaagacagtatactcgtagtcattgaactccacgttgaacggtggaataatgcatctttctggagttcattatgtgcaagttcagtgtcaagtgttacgattgatacaccgggctatctttggactacctcttttatcctcacgatagcagtcgcccatagcgtttttaattcatttgaggtaatttcaagattcagattgatggttctatctacaacgcactttatgtcgcagatcaacagtcttcaaggggggtagaaaaccatcaaacaaaaaggcacgatcatccgaactcccaggcataaatgtcactcacgtaaaccaaccttgggtctcgaggacttattgcatagcaccatacaacgcgtaacggacgttcagtgcgatcgccctccacatcacaagttagtggatggctcgccggccagtacttgggggaacattcaagcatatcccgggtgtatcattggcgtggattccattgttggttggaaataagtggtcctgtgggtggaaatcctttcagggggagctgggaaccgaggggacagatcggactgtcgaaggatctgaagagtaggaaacacgacaatcgttaacattcgtatgagggggacaccagaaatgatcattgtacgggggagcaaagcgagcagcgacgaaacgatttgaacagggatgaaaaagcaaataagcagggtcgcagtcggtttacgtactctcgtagcaggaccaggtctcgtttttggtagcatgggtgcgtccagacagaacattgacaacgtcctgtagttcaagccagaactcggacttagggcgacgtcggacccaatcagtctcggtagcctccagtccagattcaccacccatgggggagaatagcacctgtgaacctttgacaccaatgacagcactagagagagggtctgcggcaatttcatcaccgctcttgttggcatatccttcgatgtgctgcatgcacctgatggccatacgcaaagcacgagcacgatccattggcgaaggcataccaccttgttggaagtgaccgggaacagcggcacgagactcgaatcggccccttgcctcttccttgataatgtcggcgatcacttgcgtagtgtatgtgctggatgcacattcgttacgcagaataatcttgcctgcacggttagcgcctttgtcgcggatgaagttttcacgcaggaagtctatgtcacgcgagagcatcttgatatcaacaccctcctcaggaatgtacactgccacggcaccaacagcgaggccagctgtggttgcaatatatccagatttgccaccttgggtctcaatcacaaacactcggcggcgagaagaggaggcggattgacgaatcgcatcacagaagacggtcagggtattcagacaggtatcactgcccaatgagtattcagtcccggggacgttgttagaaattgtagctgggagcacgatgagcggaatcttaaacgcatcatactttgcacgagcctggcgcagttcgctgacggcagtgaaagcctcgaaaccaccaacaacaaacaaggcatcaaacttgtacagctcaaagcactgggcagtgccctccatgtcaacagacggcagggtacggttagttccaatgtccgaaccaccctcgttaacccagctatcagcttccagccaagtgacctcgcggactgagctgactggcttatcgtcgtggtgacggcataatccggggaaaccgttatgaatggccagtggggtgtggccatgagtcaggcagtatgcaacggcggcacgggttgcttggttcataccaccagccggggcaccaacgtgaatgatagcgattcgcattctctatgatatagtaagtatctagaaagcctgaggagcccggatgcgctatggaattaggtgtataccttgccttccggaagaatcatcttctggtcctggcctgcggtgtccaaataggcgttgtagtactccttgaattccggatcacgcagcttcatggcctcatcgaattcttttttgtcaatcaaggccgtcacatctttcgttgcttgaactgcttccatcagaggagtccgcatgatcttgttctcgcggatggtgatgactggtgaaggggaatcaggtgacatttcaagcacggcacgaacggcctccacaccctgtagagttgacagccagcggtcataagcgcacgctgcaccacctcgctgggtgtggcctagaattgttactcgggtatccaatcccagccgatctgtgagaatatccttgattttcgagctcgagaccttgttcaattgccgatcctgtgctccttcggcgacgataacgattgtacgacgcttgccgcgttcacttcggttctgtcaagccccttgaatcagcaaaaataaaacattgaacaacactgaagtaattccaaccttggtgattacggcacacatgtcatcctcccagccctcctttgaaggcatctcagggaggaacatccagtctgcaccggtactgatagcggacatcaaggcaagccatccacagtgtcggcccatcacctcgatgacgaaaccacgctggtgggaaaaggcagtatcgaagacatcgtcgacggcatcacagatacgggtcaaggacgaatagcaaccgatagtggcatctgtcccagacatgtcattgtcgatcgaacctaccaggcccacaatgttcaagaccttgtagggtgccacctgctcagctgacaactcccccgagctaacgaggtctgccaacaagctgggccactcggcacggaaaacatcggcaccagtcaaactgccgtcaccaccgcagacgaccagtgcatcgatacctttcaggaccatgttctttgctgccttcatccggccagcacgctcacggaatgccatgctgcgagcagagccgatcagggtgccaccgcgggacaaccaaccgcggacatcctcccagtgcagctggcggatcatattcccgccattaaccagtccttcgtatccttcgaaaatggcgtaggcttcgcagtcgctgtgaattgccatgcggacaacggcccgcacggcaccgttcataccgggagcatctccaccagaggtgagaacaccgatgcggcgtctcttagccggatgagtggcaatcttgattggctccatattgaattgaaggcttcgacctatacctcaggtcgatagataaaagaatgagacaaaaagtgattaggaagaagaaaacaagtcgaaaaaaaagaagccgataagggtttcaaagctccaagttatgaatgggtggggtgtggaggggtcaaacccaatccggtgagagaaattgggcggtaggtggatgctttgcgtcacagaaacaacttgaagctaaaagttatcaagttggatttcaagaaacataaggaactgttgaggaaaatgagaaaatgctgaaccggactggactgtatttattcttgactacctgtatatgcctccccctgagattacagtggtctgacccttcatggtacctgcgttcccttacattttggctgcaaacacatgtcaccggtcgatttaggtttagtacgggcggtgagatgtcaagttgacgtcactgatattatttgatttgtttgatttgtttgttctgtttgttctggcccctttccaatgttgctatttattgtctttctcacgagtatgttgtactccccatagtcgtcaacctcgtattcattattatgggttcaacaattattgcacaactagtcacccgtgtacccttggcaaacatggtctgaccggttcattcacacaacctcggtccatatgactcgcactaaaggagcgatgccacgcatattgtcacatggttttccctactaatatcgctcctatacctagaacgtgattgctcctgtgaaactcgattcgctcactcggaagcccctggtcctgtatagagtgttccaccagttgtaagttttttgcagtgacacgttgtgcctgcaactccttgtctaatccttgttcgaaatgctcctcatacccctgagatcccacataagaggtatttacaaaatagctttggcgaaatctccaggcaccatagttatggtacaacaaatgatcttactatcgtcggacacatgcatgggccctcgggtaacagcggaactaaaggcgaagagaaaacaaaagttatccttggattcaacttggcatgattaaaatatcagtgtgatgccgtcttggcgggctaggctgacacctatacgaatatggtgtctccctgaaagaagatggaataccgtgccatttattgattcgtatatcttatcgtgttcatgaaccttcaattgcgactatagaactatggaaaagcaagctaataataatatcaaattccctgagaataaaaacaaaacaacgcccccaacattcattaaaacaacgcactttcacgtacttggtccatcctcattatcagaaaagctccccgacatttgtcttacgtcctcggttctcaatttcggcagtgaattgcccaggcattgcgctcgtagtcagaacacggctaacctcaaggtaccgcttgcgaatctcagaccaaagctttttatccttagcagtggtcaactcgggtgatgagtagtaggggtcattccagataaaaccgtccacgagtagtttcagacctgcagggctcttctcgaactttgcgcacctatcgacatgttagcagtatccagcaatattcggtaatagcacccacatattaaaatcgataagccacaggctgattgactgacgagaaaggtcaaatcgatgtcctagcgagcactcatcctctcccgtaatctcatctgaccgtggtattagagacaacaagggggagctaccaagaatgaactctacgtcattgccatcaacgccagctttccagtgtagaatggccagggcttgagccatgacctgggcaaacgcagaggtgtccagctgcaaatcctccatttcgttgacatgtagcgggaaattgcgtaatttgaaatccttcacattcgggtcggtcctgttcctcattcggcgtccgagatagactcgaatcaagcagtgcttgttctctggcttggcagggaactccgacttgtactcctgaagggttggagggcaaagaacatcgactatagcttccctgactgggagagggattggaaagacacggcttgagatcagagcgaaactctgcacatccatttcccagctgtacaacttgggaatgtggatctccagtttcatcagattttcaacatcgttcattgcttccttgacagaggcgtgcatcttgaagtcagtaagcagttgggggaccttacctggggagttgggaagtttcgcgacggtatctgttccaacaatggcgtagacagtaccgcactgtccttgtccgatctccaggaagcgttgttgcgacgggttatctcagactgcattgttcagttcttcgaggctagaggtagttgatatgtaggatttagtcgatagcatgcgtgtcaggatatcttctggctttgcggcagcgatgtgctccggggaaaagagggtatcttttgccaactggaaaccagtgggagcaagatccttgatcgattcagtgatagaatattccgaatcgtcggtactggcctgctggcgatccatagtatgaggacgtcttgctggtcaaagtgtcaagaaatgcatgtaaagtcgtcgtaaaaagtaagagaaaagtaaaggttcagggaaaccacgaggtgcggacaaatcggtgggcgcagagaaaagtagaggtgaagagaagagcagaggtagaaaactgcctatctaggtaatataagaagacaccaactttggaaatgtaccgcccacctttacaggttgcaggtttccatggatagctctgcacagaaacccaaatagtgtgtgtgtacttcggtttatcccagtctgcagtagttcatggctgcaactaatatcctctctgccagtttaccttagctatattgtaagcaaattaaccgcatggttgagggaatcttcgagtccggcagattttggtttcgtgcgttgagcttacagggttgaagtcaaccctggcactttttgttcctcacacgagcggtacaaacaatgacaatgggtttagaccaggcttctataccaccgaaagtctaacccacagtataatctacctacgaggggggattggcgccatcaaagtttttgaagccccagctcttgtgcgcgctgctatctggcagcctagtctagaagactggcaggcttgggtgacgaggtagctatcgcgtccgccggccattgctagccgtccagccccaccgcagtatgatactgcggacctcatccctggggccactagggttacgcaaactgatcctatcaacgctcgcttacaaatgcccactcagtcaaatgagaaaaaattagtggctgttagctatcaaggctgtcaaattctcgctgactcgctgtacatgattatttttgttgacgcagcatgatcaccctctcgagtcaagcctagatgcaaggtagaacaggtcatatttgcattctctagtttcctttttcaaaaaaatgagacaatcgaagagaataacaacatttaggaaactctttttagaatgtaaacactggacctgtgaacaactgtatccatcacatatccaagatggctgtgaatatactaccatcactccttaatgctggacaccacgggatcgcttatattaagcaccacgctggcgaagttctcgtgaaagagctgctgcactctgggtaggaaatactccgtaatcgagttttcaacagtagccggcagcagatccttgtaaatccaatagtgccgaacaaaatccccagtgcagtttatattagccatctcagggtatccattcgcctcggcgcatgaaagagtctttatttctccctctagcgcagtgtcatatcgaagataattcccgaaggcagcttgctcatgagaccattgctgactccatttggagcagtcggggtatcgaatgtcggtaggacatgattcccacgcttcaaaaagcgcctgggttctggggtctttctgtccaataataaatcccgtgttcaagagcgtttttcctttcgcgtcccgattttgtggttcatctgggtcgagtgccatggcgacgagtgtatcgggcgttatgtcccagtagttgaaaagccattccataggaaggtgcggatggcgaatcatagcatccccatcgaggaatataacaaattcgtaagatttcagggcttccttcatcgccgtcactttactccatgtgccatgaagacccgtagggcaagaagtctggatgagcttgtaatcatagccatgtattgtagctataatggtcagtgttgggtggtaagggacatacatagcagagacgtaccgtatatgtagtggcttagtctaccaattgtgctatgatgagcgcttgtcatgttcagtcggctcccattcaaaagttcacctggtccatcaagtggccgggtatcaacgtccaaaataaggagtttatctctcaggggcttcgtaaatctcggcatttgtggtagtgaataagtttttccattctgatcatcgaaatctagggcgtctattgggtgtatgtagggcctgtaaagattttggataaaggagaactcgttgttcatctgcagcgccgggtattccctacaaatggttagattgccgaatgaagtttccgcggaataacgaaaatacaacgtacctcgagatgtttcggacagagaaattgtgcgaggcaacgaaaaagtaaaacagaccgcatagtaacgccgtgagtgttaacacggaaataattggctgtggcatcatggtcagtgctgaagaaaggtaatggattgtttataacggtgatgacccgcagacactgcgcgcccaagagtgtgaaaaacgaaactccaggccattcctctcggctcgtcttaaatagataggagaattgtcacgttctcgtggtatttacgcaagcgggtggaggtatacgaggtatgtgaactgttttgaattggggataagctatgattccttccggatgcggaaagatcattacctacacaaactaccaaacgagaaaatggcaagtgaactgttgattttgctcttaatctaaagggctctataatttttccgacttagatttcaattatgttttacacaaaaaaggagtgctaagaaagacctagatttaatcaaattagtattatgtcttttgcatttgtctttcaaggggtcctagaggtgcccatagatgtctattgagaataatcagccgcaaactgtagggtagggtgaaaatgatggtacctacggggtatatataaaacaaactgagcgctataaaaaacttaggtagccggtttttagctgccaacagtcgctatccactacggtactccacctttttcatcggcgtctccccttctcttgtctacttctctcattctcttctcccgtccccctcctatcttatcttcagtgttcggcgttcggcgttcgatctcgactcaggggataggaccaaatcgcccaaggttgactgctaaatgtttaaatgcttagcctatccagaaatgccaaatttagacactagataccccggtccttgatacccctcggctcctagcccttatctcccttcccgaggtctcacctaaagcttggtcgttgctatgaataaacagacactgctatggttatttacctgattagaaattttattggttttggaccaagcaattcatgtaaataaataacatactctatcattccgatatcggtataccacacagaattcactctattcccacttgggcagttcgatcctttgagatacgatcaaccccgcatgttagctgcatccatatatttactcgataacagctttttttttttctccaaagaacttgcttactctcgaggaaagcatcaatcgcacatttcgatttgttttaccgaattctgggccttctacatcatttgccatggcgccgaatgatacaggtcagcttgactctgccgcagtataattagaaggttaacacagtctagttttcagcctcgttacggctgatccaggcctaccacgacccaatcccaccgaatcctattggcaacatattccacatgctctcgccaacgtccaatcctcaaaattgccaactgaccgagattttgcgatcattgggtccggtatcacgggtctatcggtagctagatccctcttggaacgccaccctactgccacagtaaccgttctcgaagcccgtacgctctgttcgggtgcgactgggcgcaatggtggacagatggctgcgaatgctggagagcagtatatgaatcttgcagaagctcacggggtcgagacggcgggcaagattgtggactttacattccgcaatttggagaagatgcaggaattgattgaagaatatgatgccgtggagttgagcgagatgcaacgtctgcggaagctacgagtctttttgacccaggggaagtttgacgacttcaagaaaagtatcgcccggctggaaatcgatcatccttctaagaaggggatatatacaattttagatgcggatgctgtgctcaaggtgagtcttttcgccggtgtgatctatggtgtcattctgatctttttttctctaggaatacggaattcatggagcatctggaggaacactgcttcctgctgggacagtctggccatatcgtcttgtcaccaaagttttcgcggcactcttggaaaaatacccaggtcgcctgacaattgagacacatacaccggttgagtccgttgagcacatttcaacacttgcctatccgtatacactgcacacttctcgcggtccactacgagcacggactgtagttcattgcaccaatggctacagcggacatctccttcctcacctaagagggcttgtctatcccttcaaagggacaatgacagttcaagatccgcagaatgctgtgccaaatcaaggcacagctgtgtcatggggcttccactaccctccaacctacgatcctgcaacccaacgtcttggatttggactgtactacctaggacagagtgcaaagaccggctatttctacttcggcggcgagcatgcgcgttttgatgaatcaatatccgcagatgacagctttgtgaccgacgactccgtgaagcacttggaagacgtcctcccacgattctttggcaaaaacgacaaatccgattggcgtctggtcagttcctggagtggagttatgggttattcccctgatggtctgccaattgttgggcgattatcaccggagatgacggggaggggaggggacggcgaatggattgctgctgcattcaatggatacggtatggcaaacagcctgctgagtggcgaggcgttggctttgatgattctgggtgaggatgtcagtgattggctcccagtttcatatggactgggcgaaaatagactccgagagacgctcacagtctcaagggccgtcaatggactaaggtcgaagctatgagttgggcacgccggtcctcgctcggtatgttcgtgactcaaatggaagtgcatttcaattcatccttttgtagccatgatttgtacagggtattcaactcttgtctctattatgtattgatttttgccaaaatagatggggaagaaaatttttgcggtagacccactacttcacttcgcgagcgagccatcacgacttcttgctttacgcaaaaaatattcagaaacaaaaagacatggactcgcggggaatcgaaccccggaccactcccatgctaagggagtattataccactaaaccacaagcccagttgattgaagatcggggagcgagtatcggctcaaggcggcatagagtggagtggcaatgtgtgctctctgtgggtcactaccgtgacacagcggcggacacaaaatccattaaagagggttggttgggtgagccagcaataggagatggtttccaaatatgtggcattgagtgggaagagggtttttcccaattcccacgaccggtcccgtcgatacagcgcacggagtagatctcgacagacagttcatgacgggacaaagcaatcttcatcttttttcggctttctgatttggagctagggatcagaagttcaccatgttgagggtaaatcgcttcccagctgcctttcgcttggtccttgtcactttcagactttaatgaaccactattggatgagatagtaaaaacaacatccagcaacaagaggtggttgatggcggcttccacttcttccctctgagaaagtttaccaggagactcaaggtccgggtacttgggcatattgaatgacacatcaaaggtggtgccgaagggggttgaggaaaggttggtgtgaattgcgattgagaaagagccccgaggggtcaaaagcttcccatggaaggtagacagcaagggagtaaggaactgtccaatgagggtctccactactggagcactagaggtttgtttctgcctctttgttgaaaagactcttgcggtatatgctggaggtttcaaccctgctgattgcaaaacaccgaagagatccttgagtaatgactggagccagcgtacatcagacatatgcttgatgtaagctagagccgggcgaataagttgatgttcaggaacaggtcgcgttttcggggttaggggaagcggaagcatagtccgacgacgcaagttttgacggtgggcatatgccaataatatccgaatggtatgtgccaaaccatctgcaagcgaagttccttgctgtgagatatcatgttcgggttgcgaggtatcttcatcagtatcaaccaagtccagtaaaatttcgaggttatcggaagcaggaatttgaatgagattctggcgtgtcgtcacgccaaagctagcgatcgctcgagcctctcggactagctcatgaaacagctcctcttcgtaaacagtatcacgcgcttgcagaatgcgatcctcaatcgttgcgttgccgttgaaggtagaacgcgtcggtctagatcttcccgaaagcttgccatcctgtatcacccgcacccggacaaaacgggctttggatgggatcagtccttcatctaataacaaagccccatcctcggctcgacgtaaggaagcaaggccgcggttgcggaacaccggtgtggctagatttagtcgtggtcagtagatgcttcctgcagtatccgtcacatcggtatgcgctcaccttcgaggaacccatattgcacgcctagcgattgcctttcacgcgggagacgagaaattttccaccccttgtccttgacagccagcacctcattccaatatcgagtctccgacgcgacttcagtttcaagtctagaggcggcctgcagaagcttgtttgccgccgcgttgaaattttggatccgccatccccttgataccgctgatatatctttgattgtagattccggcttcgggggagggttcacgacctcggcattgagggaaccaagaggtgcgacttgcttgaggaaggccgacatggaggtttcggcctgacgcggggcctgcttggatagcaaaagggagacgaagtcgagggcgaacatggtctccatgtgagcttgcctggaaatttatcagttcttgcgcaccgagtatgactttaaaaccattagacagactcacatggcgaactgagtgatctcggcacgccgcttgtacagttgctccaagcgctctgtagagtcaagatcggtcgcatcttggtcactctcgtctacctcgtccaagccatctttttcttcctcctcggcaatcttgtttcggagaacatcttcattcacctcgcgaaaagagccccactgattgttgatttgcgcgatctccacaggcaaggtatctggacgctcacgcttctcggggatagggcgcaaaggcagagtgaaggagtcggccatggtgtcaatgcaccttaataacctccctctgtgaaacttggaaaaaccaatggctcgagaggaaaaataaggaaggacaagtggacgacctaatcgggagctcaattcggtgacgtaagttgcacgtgatcgtacctaacgctgggatagatgctcagactcacagttgactaggtagtttcctcggttggtaaagttgttttcttttcatatcttggcaatatcagtgataccagtaactttcagtctgttagcttggtgggacttaaaagtagccgttgttcaaaatcacgctgtcacagagtacaatatatatctacagcctttgataacctcaacatcacgtatcttaaacacggatactataaacattcaattttctcgattattttctgaatgttcttagttagaagtatgaaggaacctgcaacctaatatgtctacattatactgtatgtctaacctggaggcaagtcccacaaggttctgtttatctacgagtcacgactatccattcccgggacatccccatcatattttctacgcaatcaccacacttcaagcctcccatcctatctttccaattaagatactgcccgctagctttttctgaacattacccccataaataaactatggcgtcgtatctagtgaccggctcttctcgagggctcggattggcgctgatcacccgtctagcaacattgcctaaaaccgaggtggggacaatcatcgccaccgcgcgccaggacaattctgctcgactgaaggaaatttcaagtgcatcagcaggacgagtgcagatagttaagttagatgtcaccaatgaatccagcatgaaagaggctgtggcggcagtggagcgccagttgcaagggaaagggcttgactatttggtcaacaacgcgggagtgagtgactggtccccaaccggactggaaggaatgtacgttgaatatcttatcagaacactcgcttggtactgatttgacagggacaatctgaatgagacgttcaatgtcaatgttactgggccgcatcttgtatcgcgcgctttcctgccacttctgcgcaaaggcgagaagaaaacagtgatcaacatgtgagtatagtgggaaagaccacacggaggtttttatacgacgctaagaagctgaccgaaatataagatcaactactttaggctccatggctatggctgatgcgtttcgacctctgccgtcaccggcatataagatctcaaaggccgccttgaacatgctcactgtacaatatgcacagcaatatgcagctgatggcttcacctttcttgcgatcagtcctggtgtaggtgaagcctttccactcatttgttgatctactaacatcgaaagtggcttcgcaccgaccttggtagcaagcgagcagatcttccggttgaagtcggtgccgagaaggtcctggatatcatacaaaaggcaacgccggagcagaatggaaaatttgtgaacatacatgtccctggatgggagaagcgagagggctcaaatcagtatgatggcaaggagatcccttggtgatccggcagggaatcttttgccacattgcttgatggctacaccgaattatcaaagggaaaagatgaattacctcataggaagtcctccgccacgagatcctatatgccaatttcctttcttattactacttatggtctgtaagaaagatgattcaatctgctagttcatcaagtgtaccctaggtttgtcactctagctacctgatattagctctaggccacattagtctttgttcggctgtcgagttttcacaaaatcaaccaggtcaaagaagctctttttgtagtgccgctgctgggtggtgcgattgacactttgaatgccaaattgttgtgtgtagtccccaaattcccaattgtcgacgaagctccaagcaagggctcccatgacatgcacaccgtcttcatatattgacttgagaatttcagacatgtaggaaagatagtacacgctcctaggagagtcaaatagctggtcagagagctccagttctgcttctgcatgtaccggaaacccaaactctgatatcagaattgggtgtcggaaagtattccacaggtaatagagatactctcggagatacgtcggtgtgatatacacgtaggactcggagcgatacccaatgttccatccgtaaacattctttgtttcttgcttgacgcaatatgggaaaagatcattcgagattgacgggttggcagcgcaagccttgatgccttcctcggccggagatactaccgtagcggtatacggatcaataccaaaaaagtcggatgtgtggccgatgtatttcagttcggatttgctcaagggtttggctccggggagtgtttctaacacagactttgggtactgcttacccaagaatattggatttgcgaagatacccagttgtatttcttggaagcggtcagccgcgaggacatggctagagtttttcggatccttaggcactccaaagttgtcgttgaactttatgccaatcttccccgtggcattcaatgtatcatgatagaagtggtagatctgggaatgtgccttgacaacgtggtctgctcctttgaaattgaatgcgtagagcaggggctcattgaaggtcacccagattgggactcggtctgcataatgagaaagcagaacctagggagtgatccacgtcagacttggatgggaattgatgacttgtggaatagaacccgtacctttccatagttgacaaatgcgtcgacaaaagtttcgttttggtagccggcattgttgtagccgatatctgggtgtcgcgtgatattgtcgctggcgacaaacattaatgggctgtcgaaatgaagcattgtgacagctggctgcaaatgtattagaatactggcatttaacaggtatgaattgaggtatttgggatgtttaccgtcattcctgcatcgagaactgtgtcgatcaagtcattataatgatcaatggcttgttgattgacaggtgttcccggaagagcaaaaggcaaaacccgcgtccaggggattgtaaagctataatactcgacacccattgcagctagtcgctgtatatcttgcttatacaagaaataattttcgttggtgacatagtcctttggcttgctgtcgggtaccaatttctccaacaacgaaggtgatcgaccatccaacccaattgcaccttcaatctgcgccgcactccctgcaaccccaaacacaaagtccttggggaaattatagcagtcggtaggaccaaaatagtcgcgcggtggcaagaccagctcactgctgggcacgggtgtgggactgacagttgtcgagaataacccagtggtggtctactcaagtaagctacaactgcaatttgcgaggaatcccagagcacacgacatacatagttgtgaagatctgcctgtagccacatcgaagaccacgcagcttgtccatatgggtcctttgtgtcagtggcgctgataacagtttgccccggaacccagctgccccacgttgaggtcgaccagctagtggtaaaatgtttgactgcgtctgtataacgtgggccatatgtccgtgtggtcgtcggggaaggaacagaggttgcgtatctcatacttcaattagcaagcgatggtgtacactagttctacgaatttcttaccgaactgtttcgttcaaagtataggagaagggctgaaattggtatttcggtgccacattcgattgtgtacattgtggccgagcagaataacctgttgttgtcaagtatacttcctgtgcctgtatagccacagccaaagcagcaagggaaatgaacggcaatcgcatttctgaggtatctattagacagtttttccgtatcatgcctaggaagcggtcccctcaaataatgattcccctcagaggtcagtgtgtttgccggttaattgtcggcccatggtaatatggcgtcaaactcaaattaaggcttcaattggaacgccaagtgccaatgcgtcacgtaactagcccttcatagcgctgatcgacagtaccgcagacgaagttggtaaggaggagctgcaatgtccgatttcctctgctaggggcactggacagtccccggcttccccgcatcgtgcgcccttgcagatccctatatggggtcgcggatatttatcctgttgaataagaaccttgtcccgaggagattgacaacgctttcgctacatttggctgccacgtcatatcaacgcgtccatattgtaccctggataattggagaagaccgcaatcacgcccatttaggctgctcaggcacaaccgtaccttggagaactgtcattctaatgtaattatttgaaaatttctggaaaatcgacctcgaatatgtcggtaaagagcaggggaggtcgcaatgtggcacaagatattggatttgggtcatagtacattaatgagcggctatattcatcaaactgggcttgtggtttagtggtataatactcccttagcatgggagtggtccggggttcgattccccgcgagtccacttttttgttactgtttttttttcatagatctcaggttattctagtcaagactgaaatgaatgaactatatttagtaaagcagtccaaatgtagtcaaattcatgccacgggatatatttcacccgtctactcctcccaattgaaattaataacaatccggccagccacctctcccttccgtagtttctccacagcctcgggcatgcgattcagtgggtacacctcactgatttgccgtagagcccctcgccgtgcgaaatccaacgccatggcggtatcactacggctaccgacaagggtgcccttgatggtaagattcttgaagacatactggcagggatcggctcctatcgtcatggaccctgcaactggaagaccgatgcacatcacaatgccgccgatacggtcgccgataaacgacacggctgttttgtaagcagcaggggctgtcacaaacactccatgagccccgaccccatcagcaattccaataacagccttggtagagtcggcaacttctttgaaatccacgaaggcctctgcccccatctcaagcgacaatttctgcttggattctcccgtgtccaccacgatcggacgcattcccattgctttagccagctgcacaccttgaattcccacaccgccaccgccgccagggaaaacaacccaagcccccgagcgaaggttagactcaaccagagaccggtagatagtgctggcactgcacataattgggcctgcaatttcgtcggggaccccatccgggatcggtgatgcatatcgtgccggtgataccaagtattgctggtaagtacctggtatgatgagccgcaatccagagcattataaatgattcaagtcagccttacctgtcgtcatcagaccagtgagaattgcgcccttgcagtatgtctccttatcatcccagcaaagcgcacaggaaccgcatgtatccaatatcggtttaattccggctctatcgcctaacttgaaagtcttcacgttggctccaactttgactaccacacctgcaccttcatgccccggagatcgcacatcaaacgctgacatgaacgggagacccagatctccttgcatcatatggatgtcggacgagcaaagtccagtgtagttcagcttgatcaaaacatcatcggggcctacaccagagcatcagtggccgtgaacttgtgtacagtggaatacctgacacttcagtcaagattggggtcctacctggttctggaacaggcactgtttgtacctcgacatggaaatcggggccttcattgatcaccactccggctttacagtgggtgggaatctcgacttgagagtaatctatgaccgaacccatgttccgagaagctgtattgcaagactcgaaaagtgcaaagtgttgtctggaaagtctcaatggacaatatacaaaagaattcacaggagaaagtctaagttccacgaagtcaaaatctggggaaatacaaaatataccgtgatcgtaacccctctttttgttggtctcgtcgtcaatggcttggcttgactgaggagtagggacatacgtgccggataatgtctggcactcgacacctttccacttccaatttagctcatctcttgccgctttttaatcttacaggaaaattgaagccgctaaacactctggaaaagggagactgtaaaccataagaatacattttgctgccaaccaggagtgatgccaatttgaacgatcttgccgtccagacgtttatagaaaaacacttgacaaacaattgagcctgtctattgaacgcacccgacggcacggcaagcagtccatcctcgactgctttaggtgctgttcggtggccaacacaatcgatacccctcgtggtcatcccgcatatccacagttgctttccccgcatttgttcttgacgcactgcagtagagaatgcactttctaacgttggtatacggtgtctaagttgtattaatgatgattggtctcattgacgataaaggtgtatgcgccccactgaagtacgtggctttcccctaatttgagtctgccagagaaaggaaggtgataatcgaagacaaccatcgttttgttccaataggagtgcccatcagctagggaagatcccgtacatatacggagtaggtaggtacatgcgtatacgggggatgcagatacaccggaattcgggaaatcagggaggatagaacagggcaagtcagagcgagaatgatgatatgttggattcgaaaaattattcacagaatgccactaacctcatcgtctaggaattaatataaggggattagagagccgcgaaatctatgtcgacaccgaaataaacgaccgaggacgaaaaaaagaggcaagaaatgttaaaagagatatatcaagttcaatcccaaatcagccatccagtcgaaccgccaatggcaagcatgaatagcacggtcaaaatacctgcaccagccttgtcgcctgaagttatgtcgtagtcgagaccgggcggaattgcctttgggggcttatcacctgcattcgggtttcctttactggtcccaccgtcatcgttagtgactggggctgccacatgcgtgatcagattcgcttgaatgacctcaagggcagccatctgctgaccgaagtctttcgtcttatcccatttttgcgctgtccacttcataccacacacattcttattgataccaccggtacaagtcttggcagcggcctgagcagaggcttttagccgtttcatgactatatcgtatgtgaaaggagccatctgggcagtttgagccatccagcgggacaaatatcctttgaaagaccgctggtcgaccatgcaagtattgacagtctcgcaggctctctcgtacatcacgtcgggtgggtcgtgagagaagaaaacactggaagaattgatgatcctctcggtgcgatctttccatttaggatctccggtctgttcatagcattagattggataatgtagtatcggaaggcctcatcaggtcgagttcactcaccaaattatacatattagctgcgccaagcaagtatactccagcgttgtaagtccattcaatctggttgattggcttgcactcagtgaggtcactagctccatcccagaagcgatactcgggggtcatgaatccaacctcggcagtccagttccaggccttctcagcccaatcgtggtacgtttgattgttggtgtactttgccaggcgagacgcaagattgaaaaatccgccagtagagatggtgttcttataattgtagccgttattccatgtaaagatttgccagcgcaagccacccccacacgaagtagtgtcccaccggggaacttgagtgttgaagacagcctgggccatttcaagccactgaggttggtctgctggtgggtttgggaagttccgctccgctgcagtcatagcagcaaagccccaaaaaacctggtcgtcgtttccttcagttttactctggttggccggcatgaatgctttattctctcccgcctgccagagcataccttgtatcgtgatgttgttccaagtatcatcgcccgtgtagaaccagtaatcgataagggcgttgaacattgcaccggcctcccaccaatagtaaggatccggcaaattacccgggttgtcaccggggttcataccagtgtagtaactcatcatgttgttggcgacctgtttggctgcttttttgatagaatctttgatcgtcaattagtcgttgcacagagagagactggtgacagagtggaacactaacctccattctcaagatccagctctatcgcttgcacagttgaagtacccagtagagctacagccagtagacccatccacgaaggttgtgatgcataattgaacacgcgcatggcaactgatatacgccttcgcctgatagaaagcgtaacagaaactgcttgcaagggtctcaagaagaacagctaagcttggatttctcaaggatgccgttgaaggttggtagcgacacgtctccaaaagtcagtgcagttattggaagaagaggtataaagtgattattgatacgaccatgaggctcaaagtctcgttaggatgaatagtatagcttggccccggtctttggcgagatgaggatactgagagacgaagaaaagccgcccagccagcgtcaagctccccaaaatgaaaatgagaaagagatgtatttgtgggtggagtgagaaccacattccaaccgtctaggagcactggcatggtaacaaggcgtggtttcccaggccatttgcacctcctgtagggggaattgtatgagtgtaccttgaacatccgactgcattaagaaggagtccacaattgcattgtagttatatccaagattggatgacaagatgaggagagtgcaacgcgcaacgtctcatttccatggtttccttattggcgctcccgataagggatcgctgtggcattccagagcagctgtcaaaaagatcaatttgatccaatcgagaagactggcgaatcaccgagaggggcatgattgatcacaggagacagtggataaagggcgtagacaggatggtctagggccgcaaacgaacgagatgcaacaattgacgcattccgaagttgtaacttgtgcccctgtccggtagggcctacgctctatggcttgtccttccttgcactggtgaattaaatgagtacaattgtattcctattttgtctgctgtaagcaaatgccagccgtgttgaaggagttgtacagtgcaggggttaaagcctacgagttctcggcataccacagggggacccaccccctgaggtacggagtacattgcaaggaatactttcccgagctagcctctagccataattctttcaacagactataatcatgcgagtctgtccatgtgcataagaattgacgtggttatttgctaaacgagatgaaaaccgattggcgcctggaagcctcgatacctggatgcctgaaccttatgcccgagacatcaggcataaaccatcacgaaatcagacagcatagtaaagcttaccgcctttctcaccgcttatcactacccttttttcctgatctgccacaatgaagctattcagagatcacctgatctggcaacataaaatatttgtttttattccagattcagattaacaaaagatatgcactacaaaaagcataccccacaaatttcaagaggactcgctttggaagaatagggaatatggtcaattcaaaaatgagtttcgatcattttcaggtttctctgttaggaaattaccttattcggaaacggagaacataacaggtttgccggagtcctagcctagaaagttgtcggagaacacctacaaacaacccaatcccacggtcgtatagcccttccatcgcgttacacaatgtaacttttctatgaacaacccatcgcataaattctttcgatacgagctcaacatcactgttggcgtctgaggaaccagaaaaaccaagtgatcatgttaaggaacatgcataaaatttgcatttcacttgctttcagtgcatgtgcctgcgcagcgactaccggctccgaaccccttgttgccactgctggtgatattgctgctatcccgggatggtacctccaatcatcgaccaaagtattagaagggatggatgtactatccatgccgagaaaagatgtctcctcatggcatcgggttggttctcgtggcacagttatggctgggcttattgagaacgaggtatacaacgagacagaattgttctactcggataagatggaatctatcgctgatccctccacgttcgacgcaccctggctttatcgagaagagttcacactgcacccatccgccggcaaatattttaccctaaagacacatggaatcacatccaaggcagacatatatctgaacggagtgctcgttgcgtcaagtgacgagcagcaaggctcctatggcggccatcagtacgaactgacccatcatgttaaggaaggagctaattgtcttctcgtttgtgcattcccaaccaactatcttcgcgattttgcccaggggtttgtggactggaattcctacccagcagacaatggaaccggcgtttggcgaaatgtggaggtttctcagactggagcggtttcgatgtcgtcgttccgcatcctcactaattttactcaccccaattctgagcctgtgaaggccacctttcggactgatttgagcaattttgaatctagtggtcagcaaataatgatcaacggcaccgtcaaagggccagatggctcggtagctgtgcaaattagcgagacatttgacctgaagtcaaaagagagaaaggcggtgtctatgagtgtgtcaattgtgaaccctgatatttggtggcctgccctttggggtgagcagcctctatacacgatacatgccagcgccatcatccaaaaaccccagaagtcagtgtcagacagttcaattcgccaaaaattcgggattcgccatgtatcatcgagattaaacaagtccaatgataccgagtttgctgtcaatggcgagcccttccaggtcatcggagctggttatgggccggatatcttcttgcgattcgatattcacagggtgcagaatattttcgcctatatgttagatatgggactcaatactgtgcgcttggagggaaaacaggagcacccagaactttatgatctcgcagataagatgggcttgatggtcctggcgggatgggaatgttgtgacaaatgggaagggtggaaggcaagtcttctcatactcttgccgcaacgttagaacactgacaaagacagtataacgacgaggccgatggtgtcaaatggggaaagtccgactacccagttgtgaaggcagcaatgctgcatgaggcagagatgatgcagagccatgcttcgatgcttggctttttagtgggctcagacttctggcccaatatccaagccaccgagatctatttagacgctctcaaagtcatggattggcctaatccaatcattgcatcagccagcaagcgtggttaccccgaagctcttgggccatccggaatgaagatggacggcccatacgattgggtacccccgaattactggtacaacaatgaagaaggagcggcatctggatttggatctgaattgggtcctggagttggtacccctgagattggcagcctgaaaaagttcatgtctggtgccgagctggaaacactttggaaagaaccagatgcagaccaatatcatatgtcccgttatgattcgcaattttacgaccggaagctctacaacaacgctctatttgctcgatacggagagccatctagcctggaggactacatcgtcaaatgtcagatgacagattatgaggccacgcgatcccagtttgaagcttacggaacgcaacaaaatgcgacgcgacctgccacagggattatttattggatgttaaatagcgcctggccgaatctgcattggcagttgtttgattactatctcagccctatggcagcctactttggcaccaaggttggagcgcgtatggaacacgtggcttatgattatgagagccagaatatttggttgattaaccactcgctagaaaacagcggaaatcggcacatcaaggtagatctcattgattcaaatggcgaagaactctccgaggccacagtggagagcaacacaacgcctcattcctcgaaggtggtggcttcgcttaacggaattaaaacaatcaaagatattggcttcctccgtctcacactcagtgataccaaatatgaaggtttccttagtcgcaatgtatactggctctctcctaccacggatgtcttggactggtcaaactctgattggtacaccaccccagttactaagtttgccaaatacactaagctggagacactaaaaccggctactttgaatggttcattacacagcctggagtcaccaacagacgatggtttgactcatgctgaggtcctgctcgaaaaccaatctgcagggccggcagttttcattcgtctgaatgctatcaatgcactcaaaagtgtggaaattgcgccgctttattggtctgataactatgtgactctttggccgaaagaaaatctgcggttaactgttgcatttgaaggagatattcagcatactgtggttgaaattacaggaaggaatgtggagaaagtgactctcaaggtttaagcagtgagttgatatgaatcgtttcagatagcccagagaatgatgtgggtttggattaagaggcaacatcttacttgtaatgaaaaattcttcagcgtcttttaagcaaccatttgattggtagaggataatgtttctattcttgtacattgtttcgcttgccgctccgttgtgtaggactcgggtggtgacttcgccctgatataaaatcttgatggctactggtcgcagtatccgatccaggtccatatttagaatccgggccgttggaccaaaaaaacccagtcaggcgcagatgcgtctcactcgatacgaaaaagggggctgtacctctcacttcgtgtaattgacataatgatcaagcgtctgaatcgattggatgcgtagatggctgagggatccgaatcacacctgaatcacatcttgtggcgacggttaggtagtagattactaggtacataactgacgtccacctgtagttcctgtgtatgctacaggtacttcgtactggttacggaaggactccaccaccctatacggaccaatgacctttcttcggaaggttcgggtctatcttctccactcgtttaaattatcaccagtcgcgaaaatgatacctaggctgaatgtgaatttctaatgtaattttgtttttcattggttaatatttgcaggcctgccgaaagggaaggtctcaactctgtacaacaacatagagaaacgagctataagccaataggaattaagtcgagacgtggccgctgttccctgcacgtgccctccccgtgaggacggtctaggtaggaactgggcctgccaccctctccagtcctttctcagacttgcgatcacatttcgccacctactctctgatacgttcactatcggcacccttctcaaatgactggcattccattggtgcccgatggcccacctgatttcggcgacttcgcgaagaatgaagacggggaggtcgatctcgaagcagttgtagagccttggcataagtacgacatcaaaataacaccggaagtttttgatcccatttgtcttggagaagtgctaaatgagagatatctgattgagcataaactcggctttggcggcggttctactgtctggatggcttatgacattcaggacaagacagatgtggcccttcaagtcatatgtttaggggactggggtgaaaacaaatgccgcatacaagattaaaattgtcagaatgtggaggatacctctcatctagtgatgtatctaaggacttttctcctccctggaaacgaacctagacatagggttctagtataccctttgatgagtccatgcattgattctattttgttgagaaaaatctctatggctagtcgcatgtccgctgctcggcagttactgaaagccttggaacaactacataaagcagaaattgtactctgtggtaagtcagcctatccctcccacgagaacttatgagctctatcatgtgcaaaatatttcaatattccccagaaaaacggcttactgcaacgcagcttctacaggacccgtcattccgagctattatggacagatatggttgttgatcaaatcttcattctatcgcttcttgctttcctagtttcttatgctctaattttatttcttcatcaccagagctgggtcaacatgcttcgattaaacgggtcggcactgggaatctaaatctacggaatgtccctttcttgaaaagcaaacaccttcaagatgggcaaataaaatagaggaaagagcttccacggactccagaagcttctagaactgtgcttgcgagctgacttagaatggaagggaaaagagagtctgttctcatcactaaaaaattcgggaatgtcgacggagatctcatacaataggtaacttccaaggtaagcattgtctatcattcaatgctgcatatctgctgtcaaatcctggcgccaccctaacctaaaattgaaaatcccgtcaatcttgaacctagttagacggatgggtcctattcgcaactttccacatctatacagatcgatgccccaggcaccaaatccatcacatgactcgaccataatctccccttagctggcccacttgtttatccgattctccggcagcaaccccggttacggcccgttaacgccaggctgaacatgagatgggaaagaaaatcgagcttgagataaagcgcgaccgccatgaaaaaatacaagtagtctgggtgggccctgaaaaatgacgttcctatctactccatagacttctcggacatgcagcctgcgcaatcggattcttgtgcaaccggcccgcgtccatcgcccttgtgtgaggttggacatgtgatcaatggagaggaggaccctcacaccctgaatccaaatcattccaaaaaaccagaagttgatcagaaaattcaagcggtcggcgatgaactggtgcctctttactgtgtcctgccaaatggcgagaagactttcgttattatggcgggatcttttgcagcccttttttcacctctctccagcagtatatatctaccggccctcccatctttggctagcgacatgaatgtttctgtctccctgatcaatttgactatcaccacatacttggtaatgtccaacgaggtagataaggagaatatgaagctaattatttctagatattccaaggactcgcaccttctttcattggcagcttttctgataactatggacgccgtccggcatatatcatcgcttttgccatttatcttggagctaatattggcctcgctttgcaagacaacttcacggcactgatgattctgcgctgtatgcagtcctcgggcagcagtggaaccattgcactaggaagcgctgttgtagcggatctctcgacccgcgccgagcgtgggaaatacattggatacgctggaattggacttgcactaggaccgacccttggccccgttatcggtgggctgttggaccatttcctcggatggcgatcgatattttggttcctggttattttgtcggctgtttgcttggtggtgatccttatcgttctccctgagacgtgtcgagctgttgtgggcaatgggtcggtgccgccagcctcgtggaaccgcccactgtggacattgttcgtacgaacatcacgattcgatgacaaccaagggactgccgatcactccaccgtccaccgattgaagaagcgcccaaatccaattacagcgctcttgatagccacacaaaaagagatggggttggttttattgtacggatccttcttatacgcagggtacatggccgttattagcactttgtcgacccagttggcgagtcgatttggattcaactcgattgaaattggattgtgctatcttccgatgggcatcggaagcataagctcccgctgggtagttggccgagtcatggactggaactttcgccgcgaggcacagttgcagggaatgatcattcacaaaaaccgacagcaagatattgaaaagttcaacgtcgaacgagcacgcttggcgatcactcttccactgatctatatggctagcctttgtattttagcttacggttgggtgatgcagtatcgcacttcgctggccggcccccttgtgatgttgttcttcaccggtcttacaaccacaagtgcattcaacaccttgagtactttggttgtagatatcaatcatcaaagcgccgccactgctgcggcagcaaataatctatttcgctgtctattgggtgcgggggccacggctattgcgtcgcctctaatcaaatgcatcggcattggatggacaggtacattcatcgctggtctttgggtgttaggcagtcctgctctatgggttgttttctaccgagggtaccggtggaggagcgagcacaaacaggataaactcaccaatcagacgcacgcttgagcccgaaattcaatctcatgatttgtgtgaatcccgctagagaatgagcgaccggaccagagatgaagccaaccagagccaaccacattgaatatcagatctactctatgctctgcatattatctccgatgtctccaaaccaaaaaagcttgtaaaagcttggcattaggccccaccaccggccttgcactccacaatgaaatgagttgacgacgctagcgccgaggcttacgcatgctcttctataattaaaaatgatagtatggaaataagattgctcagtggtgtccatttttagagaaaatattttctttcattccttgatgtatcagtgactattttcgagcacatcggtctacgctattctctgatctcctatatccctctctggtgaaacttgtatggtttcccatacaccaccttgataagatgcactttctcggggtgtctccctttgaaggggctgtcgctgcactactcctttccggcgtagcacgcgcaatcgatttggatattagcgatgaacgtacgtggtggagttgagattccgcgcctccccggcccatgtcaattaccagagaagttaacttttgatctcataacagaatcgatcaaagatgccgcgagtacctccacttacgctatgatgaaatattattacggcaacgagaccggtcaaattcctggagcctttccagacaaatggtgggaaggagctccactttttatggccctgttagagtactggcattttactggcgacacgacatacaacgaggaactaagtgttggattgcaatggcaatcaggtacggatggggactatatgccaagcaactacagttcttacctggtgagcatcttcagagtctcaaaaggcaacaatctctaatgccgggtatctaccaggggaacgatgatcaaatgttctggggtctagcggctatgacggccgctgagttctcatttccggaccgatcgactgggttctcttggctctctctagctcagggtgtcttcaatacccagatcaaaagatgggatacaacctcttgtggcggtggtctacggtggcagatttggccataccaatctggatatacaatgaaaaattctatctccaatggggggttatttcagttatctgcacgtctagcccgctacaccggagatgcaatctatctgcagtgggctaacaagatctgggaatggtctgtctcatcacctctgctaagcaacacaacatggaacgttgccgattccaccgatgttagtaatgattgtgcgacccaaggaaacgcccaatggacatataactacggcacgtacctgatgggggcggcgtatatgtacaactatgtgagaaatgcccttttcaaattcatgttggctttgttcaagtacgtgtactaacctctactgcctacagacaaacggtactacccaggctcaatggctgacagcagtaaatggcctactgaacgcgacaatcgagaactttttcctcacgggtggggttatcgaagactattactgcgagccttcagaaacctgcaataataacgaggtccttttcaaaggactaacttccacatggttggcattgactgctctccttgttccatcgacatttgacaccattctcgcgaagctccaaacatcggccaaggcagccgctgcatcctgcacgggccacagcaatggcacttgtggtgtccggtggtataagtctacatgggacgggtggatgggaatggaggaagagatcagtgtgacaaaagtcttcacggcaaatctgatcaactttaacaagacttctccggtgacctcgaccactggcggaaacagtaccagcaatccaacggcaggtgaaagtgacagtgatgcttccagtacaacgactacagtgacaaccggtgacagggcgggcgctggcatcctgaccgctgtttttgtggctggatggattggactcatggctttcatgatgcttggtggttgatttttcgagcacgtgtggacatcgtttacttgcttcctcatttgtgcatttggagttttggcaatctggcaacggattgagtcaatagtgttgtatttatatttacgggagtttcttgttatttttttaattgataccagatttatagacccgtcggtgagagcaagatggttgaaccgactggctattgtatataacggtttacttcagctcacacaatccagaaccatattcgctacatatgtgctggataatgtctagcaactcttgggggtccccttccgttctagtgctcacccccctcgaagaacggcgtagagcactattgtcacagcgatgtcctgcagttacaggggttagtcctaattaggacaagtactttttggcattccattttcaagagcaaaaacgtaaggggagttgtattgatgtcgtgcgagagaagcaatgaccacgttttcagcgtcaagtgtttttcgggcaagtttccaagtgcgtcctctgggtcaatatcgaagattgacggaaactggagccctattttcgcaagtaatcgggcctcgtacatagctccgagtctatacgcggtgatttctgtcaattgctgtaccttttcttttgggtagctgactcctttgagaatttgatccagacagttatgaaagccgatattcggaccggcattgtcggcaccgcggttggaggtaaggtactcttgggcgagatattgtagacgtttgagccgccgtccgagctctagccacttcgctacttgccgcgcatgtcaatgggggaacctgacgcagagactgccattttccttgaatgacacaagaggcaaaccgaggcggttcggggtaggtggttggaagagaactgcttcttccctcaggtgaccttgtcctgactcttgacgatagccttgaatgcggcaatggcatcgtccaggtatacgacatctgtttcaactcgaagattcaacaaccttggaaaaagcttctagatgtgcacaagtagcggtcagttattttaggcagtagaggatacctagtgaaacgaacaggaatccgatcagtgagatagtcccaatggtaaggaaatagatagatgggcgcatgccaatgttcgatattttttgagcgatgagagagatatgtagaaggttagattctctacaacgatcgagatctagtcaaatagctaggtgaagcctggcaaaccaggcaacggcatgtgatcggcacgtggccaccacaacaatatctatacgaaaacaatccaagtttataaatcgaaatttcgaccagacaaggtttagtgccgggaagcttaattgtatgatcttgctccttcctcccctcgactcttctctttcttttcctcatcccgccagctaggtgaagcctggcaaaccaggcaacggcatgtgatcggcacgtggccaccacgacagatataaagtgtccggggattcagcatattcaaatccggggtacaaatactctcttcggtattccagccgcgaaagactagagtaaggtacaaagtgtgtaacttcgggaagaccaaatttcccagagctggctgtaccactgcttcaatcttctggctatatattttcacagttgcagctttcacaatgtcggtatacatctggcggcgctctggggagacgtttatcatgacctcgtccaggtgcatcccacttgatatttctatagagccctacaatatacgtatcgcgacctcatggcgacgaactccacgccagccttcggtggccgttgaatctccagtgaactggcctccgccatgcctttgcagaggatccccagaccgggtgggggacgatgaggatttgctacttggccagctgctgctgttgctgtcttatgtcggggactactagccaactgctggagtaacatgaggtggtgaacaaggtcacttgaggcgtgtttcggatctttcggcgcaagtctcccgaaattcagccgggcggatagtggccattgcgacacgtagtcctggttggatgggaatagaagtggtgggggctgcaatggaataagatatgtgggtcaggcgaagttgcaatgattcgatgtcattctaccggaagaggaatggctacggaggcttgcaagtgcaaattaggaaggcggtactgagtattcaggcagccaagggtatatctgattggactacagtgtagtgctgcgatgaaagagagagttgtatttccgaaggggcagaatacccgactattctagttatggaaggttggtgcctgcaccggactgatggtcaggtgatcaccatatccaacaatatctaataagctgctaaacgtacacataccaagtaacttgcgaggcttaggttcttcctatgcgcattttagtcggtcgaactcttctttgcttgaccagaaattcttgtcgtctacctcgacaaactttgttattttcaggattttgtaattcaaaagaacacaagcaaacatgcaatgtcaatataagtgagggatgaaggtcttggcacataaatgacaaggaaagaaagcaacaaagccattgaagaatgccagtcaagagaaacacttgaaaagcaggatatgaagggctggggaggtgactagaatgatccgcacggcagagaaaatggtgttcggctagtagtcgataacaagagcagtcgcatttacttcaattggtcactggaattaagatctacctggtgttcaacagcagagtgaaatgacgacctaacttccattaccgggcagtgttcccatgtacgcgtctcgatttattgcttcactctggatcgaaactattgacatcaattcggtatatgtgactacgtcgatgtaggcccagccaagaataggagctgatctgtttcaccctagaaagtacgaaattgaatatggcttgagccggcacagcaaggtgcccatctccgtcggaaccctgccacccttgtagccttaggttctggggtgctcatgatgcttcatctcgtccgcttttttatcgttcccctctatatcccgtgggtggattttggcgctgcatcatattgatcgaggaagacgctacaaaatatattattcgacagccccgaacggtcagtgcttttactatcggccaccaatctcagcccaataggcaatataatcccaccccctcttagttgctgatcggcaggcagtcttatcttatggcagaaatgtgtaggtcttgtagagcgattgaaccttctcgcatggaatgttaccgcgcgcgcattgctattttcgatacggagtacaatttcctccaacccctcccaggtcttcattttctatttgagcaattaacagtagtgtaacaagtctgattaatctgaaactgaaatcaatcatgtttttttcgtctccccattacacagatcgtctgtttcgttgatcctatatgttgtttacttctataaaattaccactgagctgagtacactctcgcctttagcctgacaattgacattcttatattagtggagtcattagattctatcgaatatagagtcttgattgaataccaataaagagtgacctgtttgttgatctggaaagcaaaacgcctgttccgaactccaccccgacggcttcggcacgggagacacgccaaaccggcttcacgaggcgtgtcggaatcggtccgcaagtagtctatactatggtgtcattgttgattatatttcagcctgaaaataaaaaaagatgaagagttttccttcgctgagacaaacctgataacggctatggtcggttgtcctcggcagtccactccatagcgggtgtcagccacacctccgattatagccgagactgacatgacttctgactggtcacttatttactctgctagagcactgtgactggatagtggatatctaaagcacctcaagccacagcggaaaagtatggatctttcaaaggtgtctttttgccctagttgaggtcattttccgacaatcagggcccattttacaatggatcaaggattaggccgaagacctagaagactaggaaggaaaaatgtgattgatgggccgaccgaaagagggacatatactgcgttgccttcctcggccagaggcttgtatattcccacaccaactctcggtctattccccaaaccttgatatgatagcatacaatggagtgcctcaatcaacacccagacaaatatgagccagatatcgacttccccattgactctcacagccatcgatccgacgacacaattgaggaaatcgaccctctcgagcttacccgtatcaacacatatcgactgcaacagaaaactaccgtaggctctacaagagggcctactccccgtgacaaatggctccctatgggtgccaataaggattacccacctctgctcccagattctgaagactatgtcgtcgagtttgacggagccaatgatcccttacatccatacaattggtctacatctaggcggtatgttcactaccgtccctccctatgtaaggtacagttgctaatacctcgacagaataatgttagtttgcatcctgtgttatggtacattcgccgggtcgtttaccagcgcggtcttctcggctgctatttctggcctgagcaaggagttcaacacatccgccgaagttggctcacttggtgtgacactctatgtccttggattcgcagccgggccaacaatttgggcaccaggatcagagctgatcggtagacgttggccactgtccctcggacttttcggatgcgccatcttcaccatcgcctgtgcagttgccaaagacctacagaccatcatgatctgtcgcttcttcgccggcctgttctcggcgagtcccatttcagtcgttcccgctgtatttgcagatttgttcaataatacacaacgaggtgtcgtcatgtcgattttctgcatggcagtgtttatcgggcccttttcggcaccgtttgtgggtggtttcattgcaatgagctctctgggttggcggtggataatgtacatctctgcaatcatggtgttcctagggtttgtcctagtctttgtgttccttgaggaaacatatgctccagtcatccttgttcgcaaggcagccaccctacgccgacagactcgcaattggggcattcacgcaaagcaagatgaagtggaagtggatttgaaggagcttctgcggaacaattttgcccgacccattgtcatgttggtcaaggaacccatactgcttttggtctcattgtacatctccttcgtctatggcctcatgtatgctcttttgggcgcataccctgttgtcttccaaggcgtctacggaatgagttcgggtgtcggtggacttgcgtttatcggcattatcatcggcgaacttcttggcggcgtttatatcctcatgatacaaagttcatataagacaaagctggcggcaaacggtgataagcctatacccgaatggcgccttccggcggcgattataggagctgtgtcctttgcaggaggaatgttttggtgagtacccttcttgaaatcctcaacaatatttgatgttctaagctaatgcctaataggttcggctggaccggatacacttcatccatccactggatggcccctgtagcttcgggacttctcaccggagcggggatctttttgatcttcttgcagtgtttcaactatatcgttgactgctatccttcgctgtatgtaaccatgtttctcctgtgaaaactagtaactaacacaattgacagggctgcatccactattgccgcgaacacaatcttacgctcagctattggctgctcattcccacttttctcccggcaaatgatggagaacctaggggtgcaatgggcaggcacaatgcttggatgtatcgcagtcgtgatgattcctattcctgttctgttcaaggtatacggtccatggctgcgggagagaagtaaattggcatgctcgccagtttttgatgttgaaaagaaaccttatgatgtctgatatgaattcatgtgaaaagccaatatacccaattttattttgaagaccagatcgaacacagctctagttagttagttaactagttagtcatagtcttagttatttgtcaatccgcaagggttctttcgttcaactataaatgacgtcaccctgccagtcaatccgccgatccatagatcgatcggattgctaggcactccgcagttcgcgagaatcccacaatctagctaacacctgcgcacttctctcctctcaatatctttcagttcacgatggagtaccctaccaataaccaaataattttcgggccagattgggacctcagtcgctggacctcctccgatgaccgcgtccgtggtggatcatctgtgtcaaatctcgatcctaccccggaaggggtgctttttcacggaaacctcgacattgagacactcggcggtgctgggtttgcttcacagcgcacgatcggagacgaacaagtatgggacctgaccggacacgatggtgttgagctacacgttggtccatcggataggaaacgttacactttctccctgacagacgaaataccacagcagaggccagacggccgtgaacaaagtgctcttgtctgggaatatgatttctgcgagagtgaaacagggcgtgaagtgcgtatctcatggaaagatctgaaaccgacgtatcgaggcaagccggtagaagatgctaggccgttggacttgtcgtgtataaaaaggttccggatcatgattcgaaggtgagttttatgtcaactgagggcgaaacatagatgctaattatatagtttctttggggcacaacaaggtgactttagcctgaaaattcagtcgatcggtctgttccgccagagctaccttgatgatcctagtgtcccgaaagattccatgggccacggtgacgacaagacgggaccggaggaaactgaagagaagaaaagctggtttcgaagttgttgcccattgttttaacttcgtggtcatctccgaaatctaaatgatcctcaaagaattgcatcattgaactcttgtgggatgagtggtgtcatgcgaagaacttcattttgtggatgttgaacttccaaactaggaagggtgctcagtcgttgtaatttaactagcgtttatacaccttcgcaccaaattcttccgacaacgaattttgggaggctacttaggtaaaccatgcaagataattccttacaaatgagccttttttcgagagccccggaagggatttggttgtgggaaatgtgggtttccctcatctcccattcgaggctcttgaaaaacatggatctccgtcgtcttctgtattccgatgtgctccaaaattttctcctgactcgaatgacgactatcatttcggttgacttctggctcgatatgagaggcaaacagcgaagcgtctggaacaagacggataagagggattggcttctgtcgaggagccgactctgtgtgcgtgtacgccgaacccttgcgggagcgctgcagtatggctgcgtaggactgtcggagggtaggcaatgacgagcagatgataataacgtacatctaatatcttcatgagctagaattgcttaaacagtacatgagaacttacctcaatcctagattttatcaacttttgtcaacaattcggagaaaatccctgggggtatgacttacgtataccacatagtaatgtcggcccatgaccctatatacgattagtcggtgtactcgtgaaacatgagtcgaggaatacatacaggtaatgtcagaatggacaggtaggttcttgagcaaaacgcatttgaccagcgttgccgccgccgcactaataagtcagcttgagcctcccggggtgtgatgaaaggagtgagatacaaaataccagctcccatgactgagatgatcgcgaccttcatcttaattgcgagctggacgtgccaaaagatataagccgggaaaacggcgagggccagatcgttgaatgcattgaaggctgcctgggatgttccagcaaccaactgaaagttgagactgaagcaggagccatccaccttcggattccagatacgctctgggggtcggcagaatccaatgatgatcacgatagctaacacattccacgctactgacaccgccatcatgatatataagaaccatcggcgcgctgcggatgcagattgtcccataagccggagcaggaaaatggtcacactcatcttaccagttgtagtgctgacaacagagaagttgggtgctatgactgtgtacttgatcgcctgaatttgccgattgccatctggaatatcgctcaaatggcgtcctaatccgtatgaaatggcgacttggaccaatgaggagcataccagagcatttgccagtgacaaagcgataaagaagtcatcccacccagcgcgcctcagagccacacgtgtgtataaccgcagaccgacaacgaccacggcgacaccaccaaaacaccaggaaactgccgtgatactgacaccgggatcgctcatcatctttgtcaactttgctgccggggtcatcaccacccaaaggccttaaaagcggacgggaaacctcgtatagcgaccataatgatcgcaacgcataccccttattcatccatttcatattagcaaaatcctacagagtactttggcgtacaacagggtactactgtgacatcctgatgagtacatccctgtcattaagccgtcttttcacagccaacccagtgaggaaatcccattggcttgaaatctattggcgggccggggaatgcggtccgggacggggtcatcgacctagcgtgctccacacaatcctttctgatgtcaaatgtggtgaacaaggcgttgttgttgtttttattcccatatctgaaatatcacctttattgtacaactctattgtacaaaggtgaccgagatgcacttcacaccctcatagcgttggctccaaatttaactccgtatagaaagaaaaataataagcggcaaacttgtgggtacaacgtccgaaaatcctttccgacttgaaacgatcgtctagacgccgtacagtatggcactacgcttggatacttggggctagaacctcgaatctcatgagccaagcaagcacacccacagcccaatttatccaccgtgtcagttataaacatgattcgcaaaagcacccaaaaggcgggaaaaaacggatcaaagagtccagggatcattgcaaattcgataacctgattttccttttcagctgctattatacacctttgtcaagttacaactcatcctcttatagagatatctctatccataacactgaagatggcaaccgctgtgtcaaacgagtcattcgaccagctgcagcaccaattgaagcagttgctgggagctttccaaagccaacacgaagaggcagatcgcgtggccgccctgaaggcagcacagaatctagtgaatgcactacaaaagccgcaggattcggtctatcatctggcctattctgtaaatattgtatcatgcagggtgatgatgatatttgtgctaactcgggctagcctactcatgccatgtgtgtgcgcattgccatcgacatggatatattcaccacactgacggagcggaatcggccggtgtcgctcgatgaactggcagccgtgagaaatgcgagtccaattctagttggtatgttcttgtctacggctttttctattttgcatgggtgactgacgatgaaccttctgtgtagaacgagtcttgcgtatcttagttggcatcggctatgttggcgaatatgacacgcgcgtctacgttgcgaatacaatgacacgccagctgactgaccgactcagtatttcggtaatcaaatttatatttgatgtcggcatgcctactcttgccaaagtccccgagttccttcgccgacaggactaccgaaacccagagggcgctaccacaggcccactacaatttgccgagaagattgacgagagtctttggacttggttgccgaaacatccggagtatcttgattcttgcaataccttcatggagggtgaccgcggcgcccggcctagttggcttgaatggttcccggtggatgagcgtcttctatgtggcgctcagaatgatgcggagacgcttatggttgatgtcgcaggcggtcgaggtcatgacctcgcagcattcatggcacggtatccgcatgtgcgagggcgcttggtgctcgaagatttgccacatgttttggaagagagcaccgtagatgcagagcgcattgaaaaacaaccgtttgacctttttaagccacagccgattcatggtgggtctcgtactctgatgcacgatttggacaattattaacgtgagttccaggcgcccgtatttattatatgaaatttattctccacgactggtctgatgaggagaatcatatcattcttactcagctggctggagcaatgaagcagggttactcaaaattgatcatcgaagagtttgtgctggctgatcgtgacggtgttatgttaccggcgatgtgggattgggaaatgatgattttctgtaatagcatggagcgctcccagtctcattggactcgcttgcttggagcagctggtttccaggttatcaagttctgggcacctcctggcgatgggcaaggcatcatcgaagccgaactcaaatagtttgttaggagctatgaggaagcgagtttgaactatcctgatctttttatttagtttgacaagtcacatgtgatattcgctcgatcgtgtagaaggtaagatgacttatcaagctctgatttccaccctaacatcttgtagatctcaaactatatttttcgtcgctcttgcgcgttgaagaagctattccgataacgcatttccaaccgtacaaaggcagtaaaatgcagacatctttcgacatcaatattagtaatagtgattaatttccaacctcattcgcacaagggcaaattctacggtcaggcagctctaaaactgagagaaataaagggtctatacagtcggtataacctcaacgcttggatatggccaaaattaccgttgtggggtgggaatagaatcaattccgcggtttaactacggagtacagaaaagtatcagcactctacttctccgtaatcgtgccaggcgcccaaaacacataccgtgtgttggtacgccccagtcaacgataattttcactcaacgataaaattgccaaaccaggtgccttttgtatggtatactaatacaaatagtacttatcatacaaaatcttaatatccattttctcgatcctctactaaggcaggggaataataggtctatacatattaattaaaagggctttagtttatttgacatctattcgaaatatcaggtagacttaaaattataagatattcaagtttttacatatacacacacatatgttatgtggtgctttttaaatatatttgtcatacttctatagttattctgtaatttagtaccagctacctgtaagcgaccgctcggggtggtgacgcatacgggttatagtttgctgagcgtagacgaatcaaagtctgtcctaatgtgacctactacatatagggggtagcctagtttatatactctatataagcctttaggcattcgaacctaccccccagcctacctggttggggcgcaccaacacacggacggtatgtgttttggcgcctggcacgattactcatggcattaggcggtgtagaaggcggtctaaaatccgtgggagctggacagttcacccaaccggtggagatcttacgtgatttaaggccacgggttgggtgaaaaaacgacgcaggttgggtgaactgtcgtctcgctcgtccgctcatcccaattaggctacgaaaccataaaaatcaggcactagactgttgatagtaactagttaactatgtaccttcgtagatatatattactcaaatttgggattcggctctgtgacataacaatgaactaaagatcttccttcaattattcatgcactcactgctagtattgctactccaggcctcatgaatccaagtagggtttgcatgaattttaaaccagtgcaatttgtactctattgtcaaattctaacaaatacatgatgatgcttttaacaaatcgaccaagaacaccccaaccccagaagcaatgtgaacgctcaaaagaaatctgacatctcaaaccgaaggtgtagtctgttcattggtgtgtgcttgcggtctgtaatctctagtagacgccgtagtccgagatgttgtggaggtggtgtggctgtgatagtttgaaagtgacggtgcgcttcgcgctggaaagtattccgtctccggctggctggtgaacatcatggaggagcggtcaacctcaacgttggtggtggattttcctttcgtggtcacaaggggtaacttcgagtacgacggattggaatgcaacagcttccgagccgcgattcgtcgtgtctttgctctctggcgcatacaataaaagagactgacgccgctaaacagcgagatcatacagacgccaaatataattcctgttatgttacccctgcggttccattctgtattgttagtatgatgggaatcttgcgcctagtgggcttgaagactcactgtccagtgccgctgcggcactactcttcgcagttgaagttgtagtacttgtcgtagtcgaagcgctgctagttgtcgttgatgcacttgtggttgatgaggtgctgctagttgtagccgtggagctgctggtacttgaactggtactcgaactggtagtcgaactggtagtcgagctggcagatgtggttgtagatgttgtagatgtagatgtctcggatgtagaggtagatgttgaggatgtggaacttgcggtcgtagatgtcgtagatgttgttgaagtagatgttgtagatgtggttgtgtcggttgtggtatctgtggatgtagtagagtcggttgtcgcagtggtgtctctggcccgaagaatctcgccatatctacgtttcccgtagagatgggctacctcactcggctctgggtcttcccataaatcaacggatgtcgctgtggctgagatccatggtgtggtttcagaggcataggggtgaccgagcacccgagagcacagcactgtgcaaagtgcaaataatagaaaatgcatggttcttcaatcgagaaaacagtacggagtagacaaagaaagaatgaatgaacatcaccgaaaaagaatcggaataatttaagacttgctttggcatttgatagtcttgaaaaaaaggccacgcggcataactagacacacgcgtaagacaatttccctataaatctagtctccaattatggttgctgccatggcttagtgtttatttttgtaccaagcgttgtggaatcagccagtggacagccggtgcaggaggcttggttgaactgcacacgcatatgccgcgcggcaccccacaaggctgattttatggttcaatctgtctctattttttggtcagtaatgttctactcaaatttcaatgttttcaagtgaacagactcaacagagtacaggatcctatcttataagtagtatagaaaaagccgtcccccagtcggctggtacatacgatctagttagttacttactgccaagagacactaaagtattgcgccattgagagataaggagattctggaaaagaaaaattgcctgatcatgatcattctcgttgaaattcaagacgtagagatttatctaaatatcgaatgttttccaatattgaagtcaaaaatatcagagaacttccgatttacgcctgagatatcaggcatcaaaaggtaaaaaaaggttaactaaggtagaaagatccaccatcaatattgacgccaagcgttttggtaggagattgtatttgcacgctcgctacggattaatgtcgtatatcttgaggatatccctggagcacaatgacgcagttggatgctccccaaatacttcccgagcgccacccgattccgcatacgcttaatgcctgtttaggaagtggggaatgaagccacatgtctatttccactaacttcagatcatccaagtaattaatcccaatatccccgggatcgtttttagtgtccgtcagcggcaatgacgcagttgagcgttgtacacgcttcccttatgaaaggaattactatatgtaggtggcattgtgacaagaccatgtggctttctagttacagttctttacggaatgtaacccccgcaaattttataatctgctgatagtttctccatatgaaaatataatgtagtatcattatctaaaatacttcccgttggagccatcaaaccccaatgagaagacccttgtgggttacatgggtagtcagctgctgcatggaatgtaattgctaacagtttctccacaaaggacatgtttgtatgtatgtagacagaatcataaatcttttcttccgttcagattgtatagtttagcaatttgactttgagttattgtctgtatacaaacatcgtcaagtgtttgatctgtaggttaaattcgggagattactgatataaggccgacgaggtaaatcatatttcactacatttgctgagctattataaaaaacctctagtccaaaatgcgtgaaaaaccacgggttacagctgctttagagtcagaaaatcaatttaaaatcaatggaaatgaggctgtgtattattatggatggcgggaatgtagaacttgaactagcacagtatagagggcaactgagtctctacttgcctgaaaaaaaaaaacaatgttagatatatacacgccaaggtatcattgatgttgtcgtccttcgaaatgatgtccctattttacttctataccttcgtacgcatgtatatataaaataaatgagacactactaccctgcaacatccggaggcccgtaaacaaaaaagaaacccgcatcatcagcaaatttttgatcgtgtggacattgacgcaccaactctacggactttccgccccaaagctccgtaacaaccacatggttccttgtaaatatggaactgattggattcggagagatagggaacaaacatcacactcattgccctaatgatgaaacttcgtaggtcagctgcgagaagtctccgagtgatttggtgaatcaatgatatatttaatgatctgacccataagaaaaatgaaagaagatgccagaaacaaaagagcagctcaaggtaaactaagagaatttaaaaacaatgacgaagatacggttcattctgggtgtgattactttactatctactctagttcatgctgcgtctacgggaaattatcacatacgtcgtgtcaaaagacagtcgacagaccgactcgtatttgctcactttatggtaaatattccgtcgagtgccttatttgtgttggatatgtactgatcatcgaaagattggaattgtgagcaacagaaagagcgcgtcagactttgacgatgacatgaagcgggccaagtctctgggaattgacgcattcgctctgaacattggcgtggatccctacactgaccaacaacttcaactggcatacgaatcggctgccaacaatgacatgaaagtcttcctatcattcgatttcaactggtggcacattgaacaggctactgaaattggccagaagattgcccagtatggtaccaaacctgcgcaacttgtcgtcgatgacaaggtgtttgtttcatcattcgccggcgatggactggatgttgcagctttgcgagccgcagtgggaagatcgatatttttcgcacccaatttccatccatctactggaacagacatctcgccagttgacgggctattgaactggatggcctggccaaacaacggaaataacaaagccccaactccaggtcacaatatttctgtggccgacggagatgatgaatacgtcaacgcccttggcggaaaagcttatattgcccgtcagtttcatttccattgaatttaaatcgattttctgactcttaagcagctgtatccccgtggtttttcacgcatttcggaccagaggtttcttatagcaagaattggaacttcccatctgatctcctatggtttaacagatggaatgagattcttgcgttgaaaccgagatttatcgagattgtgacatggaatgactatggagagtctcattacattggtcctttgaactcaacacatactgacgacggggcctcaaaatgggtcaatgacatgtaagaatatcagtccctcatccaaaggaatccctatttcaactcgaccaactaacagataactacaggcctcatgacgggtggcttgacatttcgaaaccatatatcgctgcgttcaaagcaggccagtcgtcccccgacaaccatatatcatctgatgagctggtgtactggtatcgacctgcaccacgtggggtggactgcgactctacggatacttgcatggtaccagcaaacaatgggagtggaaactatttcatgggtcgtccggatggctgggagtccatggcggattctgtcttcgttgtttcgttgcttacatccccagccacggtgcaggtcaatagcggcgggactgtctataattacgacgcaccagcaggtgcaagtgcaaaggaggtgccgatgggagttggctcgcaaagctttacggtaattcgtgatgggcaaactattctgtcagggaccagtttgaaggagattatcaatgactgcgtgtgtggtctgtataacttcaacgcctatggtatgtgaaggtattaccactggttattaccccatttctgactttgatgatagtcggaacccttcctgcgggatttgatgatcccctccagcaagatggactctcggcctttacacagggcttgcgtatccatacatgtcaaccgactccctcattaggcacagtacccccagctcccccatcttcaagtacgagcagcaggttgccgagttctcctccaacaacacccccgagtacaacacccccgagtacaacgccgcctgcaagtacaacgaccccccctgaacaatgctctactaccacatcgactgttgtgatcactgttacagtcactcagactctcagtccatcaccttctactcctccaaacggtggcagtggagataaggtctgcattgcgggaacaggatcggataactacgtaggattatgttccttttgttgcacctatggttattgtccagctgggccctgcacttgtacggagtatggggatccagtcccgtctccaccatcaactggagctcgtggggcacctcttgtaggcgaagacgattcgtacctcggtctttgcagttttgcatgcgatcatggctattgtccccccacagcctgcagggtagtttgagcgcgagtctcaaaaggggtgagatagttctcttaacatattatcgaattgtgatttaaaatcataacatgacttgtcgctggccgatttaggttccaatgtattcaaggctatgtcagatatgtttactgtgtgccggaagaatatattccaactgtatgaattcatgaaagtcctcaactaccaactgtaacaataacatcaagctttattaaactagattttgtagcaatcccttttgtggagattgaaaggcaaggaacctcagacaaatggagaatcaagacaaacactatagcattgccagcaaagcttgaactgcagcaaaggctagtacgagaccagcaggtcctgaccttccagccgcactcgccgccggagttgtggcaatggtggtagcagcagcagcgggggatggaacgccagtggtagtaccatttagagtggaatttgctgtcgctgccaccgcgctagcagtggaagttatggtaaccgccaacagagttatctggtcccaagcgacggttgaggtgctggtgccgggcgtaccagctgtccctgtaacagtgtcggtacaagtataagccccggtggggagatcggtcacatcgcagacaacgtggttatatctgttgaatcaattagcaatctattatggcttgcagcaatagttgagagttgagtaaacgcacaggtcggttgcggaacttatcaagtattcgacgctcgttggagctgcggtaaaaaaaagcccagggcccataccgcattctgagctattggtgccattcggacaattgatactgtaggtagttgttgctgaatgctatttgaaatttagttcaatgttcgagaatcattcccattgatacgaaccgcgcccaaaacttcacccaccaaggattgggagtgagcgtttggaataaacaaagaaaccacagagtcgttggcagcaagtcccagcgttgcaaatgttaggagagcttgcaaaagcattttgtcctagtctttctctgtatatggtgattgagtacaagacaagaggagattttgccgggcactggatcaattaggaaagtcagcattagaagaataaattatagttgtgatgtaaacgttatcatcatcattttctaaggctgtcgtgttgttacggaaacttcttgcgtgttgtatatcgaaatgatgaaactgccatgtcatacggatcaaaagccggccatcatcttacattttaatattacaatttggcgctcaaagcccaaaagagagagaagaggtgataatgagaagtgataatatatcctagtgattggaatatttatcttactttgtgtccacgctggtgaatgcgccatattcttcataacaggggcatccatatgatatcgtcattattaccattcacgaatagagccatctggtccatagaactccttgggctgccaaggctctgtctccttgctgattttccgtaccaggtcttcgtcaatatcaattcccaagcccggtttagaaggagcagccacgtatccctcagtaatatcgaagactgtcttgtccaccaagtagctgttcagatcaatatctccagcttcaacattgtagtgcatacccagcgacatctcctggatgacaaaattaggtatcgacacggccacttggagacaggctgccaaggcgataggacctagaggacaatgaggcgcgatagcaacatcgtaggcttcggccatattggctatacgcatggtttcggagatacctcctgcgtgggcaacatcaggctgtaggatatctaccgacgaatcctccaagaatctcttaacttcccacctggagtataagcgctcgccgaatgcgataggaattgtagtatagtcggaaagttgctttatcgcttcggggtgttcggacagcagaggctcttcgatgaatagagggtggtaaggttccagtgccttagccagctgcttagccataggtttgtgcaagcgaccgtggaagtccacaccggcatcaagacccagagccttcacttgtttcactcgttccacacaggactgtaagacggcgggcgagtctagccagttgacatcttcggtggcgttcatcttgatgcacttgaggccttgggcgattcgttcttttctattgacagaggttgttagaatttcagtctcctttgctctcctttcgtttcttgcaactcacgctgcagccaccacatcgcttggtcggtcaccgccaatccaggcataaacctgtaccttctggcgcaccttcccgcccaggagctcgtggactgggacacccagcttccgacccttcagatcccacaaagcgatgtcaatccctgatagtgctgacatgaataccggtccaccccggtagaacccgagccgccatactgtctgccaaatgtgctgaatgtcactgtcaaaggtggttagagcttttatctgtgaagaaccatgattcaagcatactccgcttcatatcccacaatgcgagtgataatttcatcgagtgctccttcgaccgcaagagaatgtccctccagtgtgccctctccccaaccgaagcgcccctcatcatcggtgactttgacaaacagccagcgaggcttgacacggaagtgctcgatggacttgatcttggccatggtgagttactggatgaattcctcgtgtattgaatgattccggagtaacaatttgagtgcgactgaattatattcgctgttcacgacacaaccccacaccatgaacgcatcccacgcgggggcctcgggagaagtccgaactgattgccgtggtatcagttctatgaggggattgatggttgaccgttaatctttatagttaaatcagccaagtcaactcagcccatatgttccttagagatgtcgaatataggttgggagcgtgagttgcctcgtcagaatgagatattgaaagcattcactgaaacgcaagctaacttcagggctacatcgagctataaattagatcactgtctgagcagctcgttcccattcaatgacatgccaacactatatcatctcccctggttatccatgaagtccacccccacgcggccattctccgatgcggggaacctcgaaagtacggtttttgccaggcagaaaattagtaagaaattaataatccacgctcatggccgcggggaataggtgagaccaaggcggtaggaaaggcgttaaagacaatatgcgcgatggcatcgcaaacgtagaaaagtctcaggaaaagacaattcttttcttttggtcgttacaaaatgtcggatcgaattgatgtcctcgtctacggcttgggagcgtgagttcaacctcttcataaaaaagatgatatactaacttctataggattggctccttctatgccttcatcctgagtcgctccgaccgcgtgcgactaacggtcgtggcacgttcaaattatgaagctgtccaggcaaatgtgagtgcttactagacatgaggctattctagtattaatatctgggccccaatagggaatcaatatcaatagcgagaatcatggccagcataactttcgtccacaccgaggtatgcgagatatgcacgattaaaatcaagctattttgctgacaagccaacaagtggtaaaatcaattgcagagatttcaccagtcgactatgtcgtatgcgctcacaaagcaatcaatcaagatgatgtggtagctcagctacagccagccatcgacagcaggactaccattgtcatcatccagaatggcgttggtaacgaggaacccttccgaaagcacttccccaacaacacgatcataacctgtgtggtgagttctctttacatcataatcccacagtctcatctgacttctgcagacgtgggtaggagtcatacaggcaagtcctggaatcgtcacgcacggcaaatccgaggctacgcagatgggcttatttcccaatcccaaggtcgaaagccaagtcgagcaacaacgccttggaacatttgccgatctcctccgccgtggcaagactcaggtccaggttgctgaggatatacagacctatcgatggcggaaggtggtttggaacgtagcatggaactcgttgactgctctcactatggtggatacacaaacttggttgaagtcatcagaagatgcaacgccttttacacgccagttgatgcaggaggtcatcaacatcgcccgtggatgtggtgtacccctcaaggatgatctggttgaccagcttatggacaaaatcaattccttgcccggcattggaagcagcatgcagacggattgcaaaaatggacggccaatggagatcgacgttatcttgggcttcccagtgcggaaatctcgagaacttggtatacaagccccctttttggagaccctctacgttcttcttcgggcggttgatggtcgactcagggccgcgcagtagatcatgatacttgatttggcttcacctgatgatgtagcgctcgctatagagttcatacacctgaagattgtagaaagttatttgaattgtccgtgatagtcgaatatacttgagacttaagaccaagactccacttcccaacggaggatgccatctatagcatactacacacttctagtctcgactgacgacgtcgattatataaatagggctcatgcaagatattcgacatatcgcgatctccggcaacaccaaaaacaaagcccaaggagggcaatatgcgaaagaaaagtcgctccagataatataaacacggctccggatattctacagtgtaccgatgcgacgtcccgctcatgacgtcgaaaatgcaagtaaacagagcgagggccagcctgcttgttcgtccgtctatttcgggaggttcatgaaagtcagaaacacccatgcgcaaatgagtatataccctaaaaatattatatagcgtattgaaatcggaaaaaaagtcgtagcacatatgacaggatcatcagggcggagtaggagaggggggacttcgaatctcctgtagctgaattgaggtggtcttgtccacctccacttctggggcgacgtccggcggatcgggaggtttgatattctctggttcctggtcaacggcgaacctccagcggttatcggcacccaagaacatgcggaaagcgtagcgtttgttcagggatacgagatgagcatgacgtttggcactgctccaggtatgtgtatcggtaaaatcatgaagcatttggctgtgcgaaatccagggaatgatggctccaatggagcgcggcattcggggtgctcggaaccggccatgtcgtgttccgaacactaaaagcacgacgatcgtgtcgaaggcaataatggctagcgcgatggcaagtgacggacccgacggaaccatgctccaggtaacgcgggtaatggtggaatttgtggctgggaccgggtgggcgaggggttcgagataaatatcacgccaaatcgagaagtaggtgctatagacccattggtatacagtgcgagtcatggatgtcagaagcgcggggttgagggcgctaaagttggggtcttcgcgttcgtagagacgggcaacaaggaatcctgcccaatcataggaagagatattgtatgtcccattctgcatgctagtattgcctacaaagctgctagggatagcagcaaagactttgttgaactgaccgagacccacggtggcattgtcgtacatagttccttgggtgacggatgttgtgggaacaggttcgtgccaactgatctgtcccttctggtcgaaagcaatagaatagttttgcaacttcgcctggggttcacagtgcaaagcaattgtgttggcatccgtgattggcgtgtccggcaaataatcccaacggccgacaaccagaacggtcgacgtctggcagatgtccgagtcctcgacatcatccggggacaggaaatggatagatagtgagattccttcctctttgcttttcaggggtggcatgcgtgccgtgcattccacggaggaattgccaaatagttcatagcgccactgttgatggccattggctttatcatagacaagagcatcggatgaaaggggctcacacttgagctcagctccaactccaagcgttgaggcaccgtaagtcacatccggattgcgattggacacgtgtattgggacaaaagattgatttgggctagtccaagagagcatagggactccactgctgatactagtctgaatcaaatcatactcagtgaattccacagcgaagtcggtccgccaaaatattgactggctgtagttcattgacaaatcgctggtttccaatgttgaggttgtcaattgttgagtgaagagcgcacccgcaacgacagtcaaagccatgttgacgaggcacgcaattgatacgagaacgagcaaaggctgccggttgcgtactgccttgaagaaaatggcgagcggactttgggacgaatagttcaatgacaacgacgtccttgccgaggcgttgcctcgttgcaggtggacccaaggctccaggacgctgaggttccggtgaatagaggtacatagagcccccacggacgatgcaacgacggaaggtaggaaggaaaggacaacctggaatgcacttgaatcggattgggtcaaatggcggaagcggccgtttcgaagtaaagatgagaccactaatccgatgagaataatgactccagctagcgccaagaattcaataagaaagaaaggaattacgagaaagtgaggcatccgatcaacacgggtttgtaggttctctccaagctggacgggggagcctaatgatacagtcagttataattctcgacgatgaatgtgattcgaagggtcggggtgatacaaaccgtcttcggtgagaatatccagcctgttgccagaaggtcccggtcgccagtaacatcttgcattcttgaagatacgacgaagttgccgagtagagaattgatgaaattccgccactggctgtgcgaggatgttggatgggtggaaaacattaacggcaatactacacatggcaccaatagaccctgggtcgctttggagaaatagttcacgagaactatacatgtaaaggaggtacaccgtggtcaaagtggctatggcaagaatgaactcagaccaaagggcggcaaaggtaacgacagcgattgcgacttggttcgacaggcgctcggcagcgaggatgctgggtgcactatccggatcaaacaggcgaccgagtgtgagcacgaacgtctgcttaacatcacgcgcaatcttggattcaaattcggtctcggtcatgacggtcgatgtgtcgagcaccagcacaggctggatgtctcctaactcctggctgatgataggcagttcagtcactgtgcgagcgcccgtggtagcattttcacgaatgaagagcatgtcactagtgaatggagcgcgttgagagagcagggcttggaagtgttcaatgttgaactgagcttttgtcagcgcgcgggtggtggctcgatcgactttgatagatatgatggagctgttggagtgcatggtcacgcgagcctccgctttgtgatagaggatatcacaggcaaatgccataccagacgtggggaaattggtcgaatctgggctggtcgtattgactccgatgagcataccatacagatcatacggaccgcagccatgttctgtgaaggcctggattcggtccggaaatgcttctttggcagcagcactgatcatcggctcccaatagcgtacttgcagataatcggtggtagggaagaagacactctcgtattgaaaatcaacggtacactttgaggcgccttcgtgtgcattattgaaatcaataccagtggcattccatgaaattgttggatatgccgactcgggatcattgatagcaacggtgagcttgtccccaacagaaacattctcgcaggaaaggtgcgcccaatacagcgtctgatcaagagtccacattatgctctcgtcttgctggctgtcgggtatctccacaggcgccacggcatacttgggtgatcgggaccggcccaatagctcatgtgagagaaccacgtcgccattggcttgcgttgagatccagttcgcttgtgtgtccaaatccacaaggttgggccagctttttacggtcctgtcgtcgatcaccgtcacctcgcgtagctcaaataccgtactctgtagagcgggaagaatcattcggattgagagcgtgacaaatgaaacccagagcacaatccaatggcggcggattgcagcattaatcggagtcataaaactttggccgaagttgtagttgatgaagaggacggtcgccggcgctccctcggggcgggacaactggaagtatggttctaggcggaggacatcaaaatcggtcacggtccataccaagacgagcacgagggagatgattatagggaggtaattgtaggcaaaagattgtatggcgttgacgtcttccgtgtagctgaaaaagaccaagcccccttcgcgatcgctatactgccgcaacccttccaggcccagcagcatcgttaacatcaaacatataagagaggacaggtagggcgggcgcagagccattgggcgccaacctcgatgttgagggcggactcggggcaaaagaaacggggcaaaacgacctagttcgcatctcgattagcatactcgtatactccatgagggttcaatgaagaatgcgaaaggaaaggggtgtcaggcgaaagcagccactcaccaatctgtgatgcccagcgccctaccccatcactaccggacatgctggatgaggtcccgaaggcggacaatgtacttgatacaaccgaagggcattgccaaatcaactttcaaccattcaacaaacctctggtgccagcacaacaggccatgattccacaaagggggtgatagaccaaggttcaacaagacaaagggaaaagagagcactcggccgtaaaaccagatgaaaacaatgaccaacccagaaccaacaaaatgagatggatctcagaaacggatctcagaaatgacgaaggagaagaggagaatcgattttgttgtggctgtgctgtctgtgcctgtacccacacgtggggcggagttatcctcaacaggcacgatcgactatacaatcattccgtacctatattgtaggtgcaaatcgaaatctcttttgactcaagaatccaactaatctggaattctcctatgtgaaaatgaagtttagtgagatttcaattgatcttctagtaggacattggttgatcaagcagtatatcataccttaaaataacctaattcaaacgagcgattaacaagcaatctctagaaaattctatggtttcatgagtgaataacggttaagttctactatttatataactggagataattatgaaaataaatcaccagcaaccaaactagaagacgacgagataaggatatactaccaagtagcatagctgggaggacaagcaacgccggaagagaaaaagcgtgctgggattcttagacgagctagttccaaggagagcagtagcagtgagggtatgggggtcaagaagtaaagtaagggtctgtatagtgaaaagctcatagataactatcggcttaatcaattatatatattcaagcatcgggtgacaaacttgattgatcacggttgaattcatcctaagattgtaagtattgcatcgccatatgtcaaattagacccggctatcgaagtttgggcacgcacgtggagcttctaaggttcagccatatgggaattccctatagatatagggaactgttgtagtttggcatatgaagtccagcggttcaacaggtaggagacttgggcgatccaagtgtggttgggaattgggatctttgtatccgtggtctagatagttctggttaagaatgatggcctggctcatcgccacttgaattttccgattatcgggcctgccgagatcggtccactggttcaccatcggcatgcctaatttacgggcaccgaaacctctccacgcttgacttcaatatgcatatccgagaactccgtacatggacagccaatcataccattgattctgattggccattctttatccttatcatgtggatatagtgaatatgctacctagtaatctatcgtggaactacatacggaccatagagtcatatgttgtagtagtagcatatcagtctcaaatgcctagacgaaagtgggtgttttgttgtatcagctgtatgtgacatcttgatctgtatttgggcatggcttgcttgatggcctatcaaactaatgatcatgaacccggagtgaatcacaatactccggccggatatgcggccacttctcctaacgacgcaagattttgagaatctgattatctagctcaacgttacaatggacgttatcatatgtaagataacactccgatatctttcaaaaagtctcttgaaatctattttcttcgctgcgtcatacatagctacgaagaagttgaacactagatttcccttgagtctagttacccttataaccattgcaccaactcgactttgttcaaggcgacacagacgaatatcaattccaaagtcattaatttcgagggttaaggataatccggaattgcctccgaatataacaggaaaaacagagaatgcttcacttctcgtctctctgcatttctcaaaagtatctgtacaatgctgtaacccggtatagctacatccctcgtttgtcttgtttctttcgagctcccttgaggaaatctaatcaagcccattgaatatccgagtgccttctttatatatagaaaagtaaccgatgccaaggagagaatggttggaagctggatcgtcagacgtttgttgacgttggggaaatggcccgatgccttggtcttggcagtcggagctttccccgagagctcgcactcgcttccctcttgctactccccacctatttccaactcctctcctctcctcagcaatgggtattttcagcaaattggtcaagaccaccgtcgcgggcagtattgcctcggtcggtgtcttctggggtgccacgcgcaatgacgttttcgaagccatggacagctccgatcccattttccaatcagccttttacaagaagttcaacccaaacaacaaccctacccttcatgatgtctgcgttcgtcgcattcccctagacaagattcaaccctcactggtcgaggagaagggcaagttggtggaagcgttctgtgccggtgtctggggtggcctgggtaagtcctaccctggggaaacgagccttgtcgcgatgtaacatgctttttaacacgttgggtttctctccaggatacattccccagcgagccatccttgaacgaaagtaccgcggccccgagactgccggtcatctctgggaccgatcggaccttctcaaaaacaaatacgaagtaggaaccatcgtcaccgaccactttgaggtcgtcgagaagaccgaggaccgtattgtcgttcgctgtggtgactctccacgtaaccgtgacgtccgtccctccgatggcctcttcgaaatcgccgctaagatcaagccgaatgaaggcgttgctgagttcagtctgaagagctgtttctaccaggggctcggcaaggcggaaggtgcgcctatggatgacaaagtggcttgggcacaccgtcagtatactaagttattgctggaaaccgccgtgttgaagaagtgcatccggtagaagggaaggacctcgcatacgaaagaatcctaaaccttcggttgggccatgtcgtgtatatattcctaatcaggtatccataatcatggtctattagcattcaacttcaactcaatcgggacaagcataaaactttcaatgtttatgtttttctattcttctactttacatctatatttattcgaccacaaagattctgcactttcccctatctaaaggctgacatacaaaaaaatcaagacttcaccacctcggcctcgggctccttcatctctgggaagtccttctcctcgacggcgattgtttctacatcactggtcagagtgatagccaggacggttgggatagcgataaccaatgagcccatgcaaaggccccagtccatagcgaattgggtcatcgcgggtttcttcatggcattgatacgccacgccattgcaccaccaacactctggaaggtcttgtacgctccgaccagaacggccgatgtagcgggggaattggactgagcgcccacgatccagtagcagaatgattgccacagcgcatcataagcaccgtagaagatgtagaggaacatcgggcccactgagatgctaccctgtgtgtaatcgatatcctgcttcaggcccttatccagacgggcagtagaccacaactggaacttataaccaccaccccagatgcccattccagtgacgaacaagaatacccaggcgatgcgagcgcgcatgggtcggttcagacccgggaagtcgagaatgagacccatgacgagaccacccagcatctgcgcaatccaataaagcgcgccgttgagcgaacgcgtccggatattaaagttcataccattcacagcattctgctggtaggagtagaaaacattggcggagaagaagagcggcaggatacacaacacccgccagttgcagatagtcaggatggcatggcgaagaatgtggcggaagttcttttcgctctccggtgtgatctgcaattgggcacctttgacatacgatggcgggcaaatgaatactcccagggcccatccgaaggccatgatggtaagtaaggcgatgtacgttgagtcgctaacagtgccgctcgtcgacttgaaattgatgccgaaactagcgagagatccaacgccaccaccgaggttgaagataatccagaagactgcgattgcgcgacccttgtgtgactcgggcacataggtagtcatgatggcgccctgtgccacccacaagaatgatgcgccaacaccgagaagggcaccggaggcaatcacaaatgcaccattgttggttgctgttggaagtatacgttagctgtgtatacaacggcagtgcggattggaagctgaacatacagttgaaacacagaagactgccggaatacaatgcataagtccatcctccgagcaagagacaaactctgggtcccacacgatcgaagatagggccgacaacgaagagtgcagttccggcagtacaggccaggagagctacagtcgcatttgcagcgacggtctggttaacttgaccggaaccaccaagaccgctgagagcattgtacatctaatagcattgttagttcttggaacttgactaccagtccttgccaaactcactcccgggcagcagaagcagatgaaactgatcaagctgatctggaaccaagaatcggtccagatcttgaacaaggtagagcgattctcattgtgggtgccggcgacacgcccttcttcgactgattggttcgacatcttgtgcgtatgaaacaaaaagtccggggagggaacgacggggatcttatgctaaagacttatagtactagtcccgacattcccctatatcggacaattagcgcttatcgagtctggggccccacgcgatacggcagttaggttgcacgcgatacgctcatggttgcacgcgagaacggcgtatgatatgcgtatcttcagcgtatagtatgtggatatctgctgtgaagtagtagcaaaagtggagcaagactgtggcctttagattgaattgcattatcgggccttatcacacgacttcttctttctcggccgacgaatcctatggtagataaactccactacgccgccacatcggttcatgccgattcctttctgggaaaagtctggagaagttgaggtctccaccccggtcgcttgctaaccggtccaatcctgcgagggcaagatcccgtcgttgtaactctaccttgtaacggctcccattagatcgggccactaactgtctttttggtaccagggacttctcgctttacgtacagagaatctgtcaacttcccatcttggtatagacctcgtggaatggagcggtattaggcacgtggctgacatcgcgctatctccgaaatggatcctgttcgtctccccaatcgtctaaaagccccccttatcgccctttttccgtgtagtttgagctctgactcgtgattcgtgaaaaaaattatattaatattctgacaagcaaaggcgttaagcttgtcatctcccaagcaatcatcccatccttggaagaacacccggcataatggatctcggaagtctatctcaactccaaacggagggggtcaatccccgaaccgtgcatattgaccgcatgtcgacccttgacatgtgcactgtgatcaatgccgacgatcaaaaagtccctgagagtgttgttccttgcttgcccgttatcgcgggagctattgacgcactgacgccgcgagttcgacaaggcggtcgggtgatttatgtcggcgctggcactagcggaaggtgagtcacgtgacagtggtccggtagtcaataaacaaaaagattaaaccgattctaggcttgggatcttggatgcatcggaaatccccccgaccttcgctgcccctcgcggacagttcgtcggcctgattgctggtggagatgccgctatccgagaggcccaggagggagccgaggatgatgagaaagccggtgaggatgagatgaaatccctcaacctgaaccccgagcttgatagtatcattggaattgcaagctcaggccgcacaccttatgtcctgggctgtcttgctttcgctaagcgtctcggttgtgtgaccattgcggttgtttgtacagttccttctgcgatcggcctttccggaaatgtggacttcctcatttcacccgtgtctgggcctgaagtggtcactggtagcacccgtctcaaggccggcactgctactaagctggtgttgaatatgctaagtactggtaccatgattcgcacaggaaagacttatggaaacatggtatgtgatttgcccccgaccgttgtactctggctaaatgttgatattcaagatggttgatctcgtggcctcgaatttgaaactcgagcaaagatcccgcaatattctacggaggttgagtggaaagtgtcagtccttatccgacgctgaattggacgctctccttgcgagatgcaatgccagtgtcaagctggctatcttggttgcggagaccggggagtcagtcgagaattgtcggggatacttcgacgctgccgggggagtcttggccaacgcgctggctgccatctctaagcccatcgaacagaaggccacagttacccctactcaaaagtttgccttgtgcattgatggcggcggtaccaagtgtgctgctgctgtggccgacggtcccaatgtcgtcggccagggctctgctggtccatgaaatctgtatgannnnnnnnnnnnnnnnnnnnnnnnnnnnnnnnnnnnnnnnnnnnnnnnnnnnnnnnnnnnnnnnnnnnnnnnnnnnnnnnnnnnnnnnnnnnnnnnnnnnnnnnnnnnnnnnnnnnnnnnnnnnnnnnnnnnnnnnnnnnnnnnnnnnnnnnnnnnnnnnnnnnnnnnnnnnnnnnnnnnggcggtcccaatgtcgtcggccagggctctgctggtccatgcaatctgtatgatctcttctcgttctgattctatcctatgttcaccctaatgctaactttgtctagaaccgatagcattggaaatatagacggagtcattgccacgttactcgacgccgcaaaggctgctctgcaagacgccctgccaagcgacgtggaacagacagaatcttcttggaaggaatgtctccaaacatccttcagctctgtctggattggactagctggtattgaccgagctgggctcgagggagtactagcacccaagctgagacaagcgttcggaatcactcatgaaaaggacctccggttaaccaacgacgtagatctgttgactgcgggtgttccacaatcattcggtacaccctccgtccttgtggtcattgcaggcacggggagtgttgccatgcggtacaaatggtccgaggatcaacacagatacgcacgttgtgcccgttctggaggctggggccatatgctcggtgatcagggcggtggctacacaatcggtatcaaagccattcaacacaccatgcgcgtcttcgagaatatcaccttggggcttgataaaactggcggtgatgatctttccaaggcggttgcggagaaactgggctgtcaggtgtccgatagtgctagccacgacatgttgaacaacatcttggcccagaactactctcaaggggtaaaggcacgcattgctagcattgcgccggttgttctcgacttgatggacaaaaatgagaccgcagcagatatcgtgagctcccaagtagctttgcttgttggcgaaactctcggtcgcttggtcaagcctgaagctactggctatcagccatccgaggcctccgtgttggtgttggcaggaggattgatgaagaatgagagatacagggccacattcgataagcaactggactcgcagaaattgtctttcaaaggaacggtggttgttgaagatgcagctcgttcaggtgccacctactcgagtcgttgagcctggttgggctgctttttccaaaaaatcaataaatagacttcttctacttcgcttataatcaattttcttctcttttttttctttgctcaaacactctattcgtctttcatctttttgaattgaaataacaatcggctcaaatttcactatcgttctattttaacattggaaccgcttcaatcaccgattccatcgccggactctggttccaaatccccgtgatttccaggccggcactatgcaagagatctctccactgtcgctctgaccgctcgacaccagctcctatactcatcatctgaatatctagggaggcctgcatcagcggcgtatcggtgtctggcaggacgaaatccacaatgagaatccgagaatagtccggcgccattgctgtcaccgtattgcggaggatcttgcgactgatatggtcatcccagtcgtggaagatagagcgaaagtagtacgcacgggcacctttgaccggttgaggatccatgaaattgtatcccatcacctcgattcctgcactctctgcctcgaccccttcgatcacgcttggtaaatcctgcagtaccattctgccaggcagatggccatattcccggcggaacttgcccagatcatgcccctggttgccaccaatgtctactaggaagacggtatctttgtatggcacggcatggccaaacagtcgtccgacggggtatatatcgtaccacatcggtctaccctcgcgacgactagccatgtacgagttgaagagctcctgctgctgggcatgactcgaaagccactcaaactgactctgaccaacggcccattgcataggcgactgagtataatcctggggattggcatagccgtgggagcgcagatactccggaagtttgctcagggttggaaaggtaagatcatatctaaacaagggtcagtgagtaacggcgcgaagagacgcaagccaccaagccacatcacatacatgcatgggattccatctctcccaatcggctgagtaagtgccaccgtcttctcattggcaacatagagctcgggagtcggtgtgacgcacagcccaagagaagccatgacacgcatcagtcggactaattcacggagttagccgaatcacaatgtgtgacgaactaatgatattgcaggaaaaagtaccaattaaatcacgctcagcgcccgtgtattctgccagctgagcggctgaaagccccgttcctctgtgccgcttctccacaagcatggcgaaaattcccaaatcaatgacaacgcgcaatgcagcattttgaggaggctatagtccagtcagaatgagaagtcagttttggtccgtggaacgcctcacctggtagatcagacgcaacacggtctccgtcggcgtttccactgcagacctcagctcgtcgatcactcgtaatagctcaaagtgggcttgtggcgatggctccaaggcttctttcagagccatttggccgagacggctgaccaaacattgaaagggtgtggtgatcgtcattatcgctgttcaatggaaagaaaacaccgatacttagtgtggaattctctgcttcgagtagtacaagctaggatgatggaactatttggctggatctcgattgcatcttatagttcatggcgcaccccttggtgacagtaacatcggacaagtaaatgaattaaagacccttgtttccatcggcgttcaattcattgctacaacagacggatgcaatatgggtaagcttacaccgaaaacagctgaaacccggggcatatcacatctagacgctccactgttcgatcattcttggtccatcgtctgaatacaccgcatttgagagagaagttaacccgatcgagatgacctagggtgtacgatttgaatccggaccatctgcgagtgtctactttctgtactcacattatcctcattggactttactttttttaataaaaaaaagcaaatcactgaacgatcggcacaaaaaaggaatctggcgatgtggctttgtgacttatgctataaagactgtgatagtgatcactagccgctgccaggtcaatccccaaaacatttcagtgatgccttctcttccaaataccattaagtccgaatctgactcgcgatggaagccagctattgcaacagttagtctgggagcagcgcatttacaccccattgtcgccaaactcgatgctgccgcctggaatggtcagcaaggactcgaactctttcatgatgatatagcgcagctcgccaagacccttcgcgcccatgcaactgacagtgccctctgcactgatcgggacttcgagatcgacgcagcacacgctattcgagatctatcttctgagcgtaatctacaagttctagctctccaacctttccgacactacgaaggtctcattgatcaagaacggcatgcggaacgtatcgacgaactcaagcattgggtgcagttatgcaagattcttggcgactcagtcttcatcctgatcccatcatctttcctcgacgcctcggagatcacctccgaccgagaacgtctcgcagcagacctggccgaggccgcagatgtagcattccccgtgcgcatcgcatacgaggccctggcatggggaacatacatcaacacttgggaagactcatgggatgtgatcaaacgggccaatcgacccaatctcggcatctgtcttgacacattcaacatagcagcgcgactgtgggccgaccccaccgccgcaacagggcgacttggtccgagcgcagaccgagatctgcggaactcgatggaccggctggtacgggagattgatccagaccgagtgctgatggttcagcttgccgacggcgagcgggtagcccccgagacgcccttccttcacgcaccaggcctgccaactctgctagcctggtcgaggaatgcgcgtctgtttccgtgtgaagaggaccggggcggataccttccgattcgcgaggtgacggatgcctgcatcaacggtttgggttataccgggtgggtcagtatggaggtcttctcgagatccaccggggaagataacccggccgtgccgatggagcatgctgcccgggctagtcggtcctggtggcaggttctggaatttttgaaagaaaagtcggggaagggatccatctaggtcttgagaggcttgaagatcagcgcattttgtttcagtcagtgttattctacattttttcggttataaatggaactctgagtgcattcaattggcacagaggaatgatagtcttggtggtaaaataggccagtgttttgcaatatccttttatcgtattctcgttcttgatgtcgataaaccagtcatgctcgaggcctacacacatacccttctgcaatccaaatgtgttagatctcaaatgaggaaaccaataatcattccagaactccgaagaactgcatacccaaccaaactatcgggtgcatctccttctaacggaacgctacaggatcattcccgttaactggaatgttatgcccaggtctgtattttgagactgagaaaattcaaaataaggttggaatgatccgcgtagaccgatcgaacgggtcggcattcttgaatggttcccgagaacgtttatcctcctcggatactcctccgtatagagatcagaactccacagcacattccccggcttcccggatgcttctgccggcccgctcccgatccaatttttagagtggagtctgcatactagatgactcccaacgctgtagtgttctctaaggttcctagaaaaaacagctaaatcccgtttgacatggacctcgatgtctagacttaccgctgatctatcttcaagggtggtgcgtcactcttctgtgtcattcccctagccaggggtgaaaggagacgtctcctgcaatatacgctttcaggtgagacatcgctgagcccggccctttattcgttcgctgtctagaatggtcttagtccgatttagcactggtggaagagtaagactgttgtacgttacgataaacctgttcaacaactttgggatatatatgatggccaatgaaaacagagcaaacacttcatcggggcatatccgagcacagcgctttgtgtagcctttacttatgagacccaaattgttccagactgaaggccaacgttcaccgccgagctcggttacactgattggcacactaggtttcagagtcccagcgcagatctagacctaattttatgcgtttaggtatgttgcaactcattatcacattgaagctctatcacacaggttccttttttttccggcgtctagtagaaagccttttggggctatcccaacggcattttaatcccaactgaggcggatgtgtcccgggcagctctgcggtgtaacaattgccgctggttgcgattgaaattccactccgaatatggagggaaatgcagaatgtatgcacttggttaaagctagacaaaggaataattcccaaaagttggaatctggccactagcaaggtagctagtcagtagcctgagccacagtagatgtagtagaccaatctcgacgttaacggaacgccactgttggatcctcggcgaatgaaatctctggttccaagctgagcgtttgctagtgacacaaacgagtccctcggcgatccagtcctcgtgcattgaaattgtgctgctgtacatggagtgtatgcatatgactatccctgagatattattccctcaaatccgaactattcaatatgcgccttgatgacttttgttggaatctgcatagtcatcacagcatagtatcgggtcctttgtttgctactaggccgatccctgtgatgtgtatatccttctcccgatgcagaaggacttcttttcccggacatcccgaatgcagtcagtataggctcatttggaaacatggatcattgaagcggtctataggagcacccgtcccttaaatacgggttggccctcaatattgcactcgaataccaagctgctgtgatacccttcctctcattctagaatcattctgtactcataatgggtatccaacgtgggagtccggcagcacaggctggcccctccggcactatcaacccgttggtgcaagagtttggatcgcttcaagttctcgacgacttgattcgcttgcgagctgctgattctgttcaatctcccattcttgcctatccccgtttcgacaacgatgcagcttcctatgaatactacactgggaaacacttggatgctatgataaaccaagctgtcatcatgctcatcgatgatggattcaaacaggttggtaataacttgcgctgcgtgatgtcatctctaacaaattaatcgctaggcaacgcggagtccatccatcgtggcacttcttacattgtccgacttgaacatggtgatcacctttttcgccctaagtcgactgggttatactgtcatgatgctctcaccgagactttcgggcgaagcctgcgtgtcattgctagaaacggtcaattgcgagtcaatcatatatggccaatcccccaatatccgctcaacattgggcgagatcctttgccggaggctagtgagctgccgcccaatgctctcatgctcttcatacaacaaattacaatcgtcatcgcatgttctgcgtctgcgtcgcaatcgaaatcctgaaaaggtcgccttgatccttcattcatcgggatcaacaggcaccccaaagccgctcttcctcacacacaaagcaatcatgactcatcctctgcgaggtcctggttttacttctttcaataccctgccatggtatcacctccatggcctatccactgcattgcaggcaatgtggatgagaaagacagcctatatgtggaacgctgcgctgcctttgactgcagaactcgtggccagggccctcgaagaggccagaccggagtctgtagcagcggttccatatatgctccaaattttgattgatgatccccgtggtataacagcgctaaggcaatgcaagttggttacgtacggaggtgcaccctgtccggacgagctgggggatcgcctagtaagcgaaggagtacactttggaggttcattcggcctgtaagtactattctgcgagtatctacagccatgcaaagactaacaatctgcagcaccgaagctggccttgtggcagaatcaatctcacgaccgaaaggtgacccttattggaactatctgaaattcttcgacaatatccgatcatatgtctggatgaagcccatctccgaatcagatctgctcttcgagtgcgtttatcttgctggtcatccagcgttgacaacctcgaattcaaacgagccgccaggatccttccattcgaaagacgtcttcacccctcatcctacaattgccggaaggtggaagtacatctcacgattggatgatcgaatcaatctagtgaatggcgagaaggttttaccactcccgattgaaggccacatcaaacaacaccctttcatccatgatgcagttgtcgtcggggtaggaaaagctgctccgggactattgatttttcgagcggacgaacctgaagccaatcgtctctcagacgaagaatacctcagtgcaatctggccgacaatccaagaagccaactcccaggcagaggccttctcccaaatctcccgcaatctggttgctatattgccacatggcgccaagttttctcgaacagacaaagggtccatgatccgagcacaggtctatcaggaatacagcgaacttatcgaaggcctctataccgaagggaaacagatgtacgggaatcttcagcttgacgttgtggagacagggcgcatcctggttcaactagccgagcacgaacttgggatagccctctctggtgtcgacgccaatttcttctctgaaggcgttgacagtctcaaggcaatccacttccgacgtctcattcttcagcatttcaagtttgaggtaagccagcctcctggtccgaacgtcatatttgaaacgggctgtatatcacagttggctcggcatatctgtgctttacaaaacggcgagatattcgaacaggtcgggagtgatgtctcggcgatgactgaattgatcgagaaatattctgtgtttgagaggcacattcccgagctacatgattgttcaggtccgaacagtgtagtgagtgtttatcctatcttgctgtcgcgaatcaggttcagaagctaacatagccaagcttttaacaggagccaccgggtcgattggggcccacgtgttgtacgagctgcttaatgacgactccatctcgacggtgtactgtctcacacggcgagaatcgccactggaagcaatactctgcactctagccgacaaagatcttctcatatccccagaacagagaatgaagatcgtcgccttcgatagccgcattgaccaacccgatttcggtttatctctggacgaaagtacaatcaaccacatgctggattcagtctcgctcattatccacacagcatggcccgtcaacttcaatctcccactgaccgagttcgagccgcacatccagggactatacaatctgatccaattctccctgtcggtgcagagacgcgagcctgccgtcatgatgttctgctcgtcagtctccaccgcgctcggttcccgagcagccgaaatccccgaagaaccagtcgatttggattgcgcctttatgggttacgggcagtctaaattggttggggagcggattgtgagtaacgcgcggcggagtggggcgagggcttattcactccggattggccaggtctcaggccactcgaagaagggcctgtggaatgactccgaagccctgccgctgatgatccggtcggcgctgacactgggcgcattgcctgagctatctcagccatgttcttggctgccggtggataagcttgcgtccagtattcttgaactagctaggacttgtgctacgccgagtgagtttggggaaagtcatgcgtccagctcggctttggagtacgttgatgactcgattttcaatctgtgtaattctcgcgaattcacctggtcatctttgcttcatacgctgaaggattctgggttccggtttgatgtcgtgccttttgaagaatggttgctaagacttcgtcggagtgagacaaagggtgaggaacttgtcaatccggccgtcaagctcattcatcattacgagacgatgcatgggaagaattctttcatacagaacagtctcaagaggtttattacggacaaagcagagaggagtagtgtgactttgcggaatggccgactgagaattattgatgatggaattctgagatgctatgctcaagattggttggcgaggtggacagtctagggagtgaaatgtttaaatttgggctaaagggtgtctgtatatattgttggatcactaatagttcgaggaatcaattcttcattaactacttatgcttccttttgtgtgcaatgtgcaagaaaaggcaagacgacggcctcggaggcaaaacacagactgaatacagactgaatcgaaacaaaaccaagcaggatacggccatctatagggcctgctgtactgtacaataaaaaagatgaaatctgccaaatttggaccagtttcaaacgcgatctagaacaaatatttaagccaaaaacgcaacaattagtccgacaaagagagctgggatgctcatggacaactgatagccagcaccggtgaagacagggctagctccagactcagacccggtgggaacatagtagccagttgtagcggatgtagtcgtctccggagaagcagcggtagtggcagagctctgtgctttggaggctttggaggcctcatatggaacgctagaaacaatggcagaaggaaccaaagaaggaaccgcagaagaaatagtagaagacgcccatgatccaccgaaggtctcggtggggagggttgcaacggacgtagcagcgacaggaacagctgcaggcttcgagttggtgtggctctgagcagttgggacgtatgcgacactggagggagggaccacggcagctgcagaggtccgtgcctccgtagcttgggcggtggctgggatttggacggattgcacagccggagcggagacagttgtcgcaacagaggactgtgcggcaatagatgaggactcctcagcctcggggcagaaggtcgcagttgcagtgactatagaggtgatagtccgagtcttcttgctggcgatgctggtcgtagtgctggtgctagtagtgctggtggaaggttgcgcgactgcttcggtggcaatgctttcggtagtagctgcgacagtaggaaccgaagtagaagtcagttcctgaactgcgccagcggtttgagtttccttggaagcaactgagtgcacagtggtggcactgtgagtagtgtgggtctcagtagttgtctgcgagactacagaagtagcggcagtggtagccgacgcggactcggatgacgaaatcgaggcaactccagtctgatagatcttgaccgagttaatctcccagtacgtctccttgaacttggccgggttgttggcgacgtagttgtggcagctctggaaggaatcgctatcggtcacggggcagccggaactaccaaacacaccacctgcccagtctccgcagaaggtgacatcaaatacaaacgactgggccttgaaggagttggcaacgtcgcacgactcctgtaccacggccataggagtgccaaattccgttacatcggggttgccgctagtaattgaggccgggatcgagctgcgagggaagtaccaaatcttgaggaaatcgtcggtccactgcagtgagtagacaccaccgttttgtttgttgaaagatgtgccatagctgccctcctgaccctcgaccttacaaccgatggttcctatatcctcaccacaccctgtagcattgaccgaaccggtcatatccgtatctgtcaaactgcaagtgccggctgtgtgcatgacgatttcgttgtaatcctgcaagttgacaccttcgatgatatcaatctcaccgtctgcaggccagttctttccgacagaccaaaaggcaggccaggtaccgcagacgctaccaggcatgtgggcgatatcggcgataaccagcgactggtcgtagtatttcttgctgccaatacgtactgagtcacggcccgtgttgccgttggggttcagcttggtagcatgatcgacaccgagatatacactgccggtatcggtgaccttgacgagccctgaactttcggcggtctccttgtcgaggtagttgacgaagccattggtcgggtctgaaccaacgtgaaaattgaaatagtccaggaaattgttcccctgccaagtctccaccagggagtaactcgtggcggccacgggggaagataacaaagcgagcatcagcgatccagcgctcaatgaaagggttgaagaaaccatgttggaggcgtataacaagaccagatgcttgagataatccagaaagcaacgagaataaaatgagcgagagtgagtttgataaaaagagagactaaaagaaagaccgacaattccagattgtcaaagattgtcaaggagaaaagaatgtgagcgtgtccaacgtacaacgcagcaaaagtgggaagtatttggcccaaatacctttcaccagccgcacacgcccatattgctttatgctaaaaaactggagatcaatcttgtctatccagtgacaatgcgccagtgcctgagaccttctgtaataggctgcaactccggagtcaacaaaccccgtggcgctctagtccaggaggccagtccactcatgatgatccattcttcagactaataggccgaacaacataaaggggatcgactggtcgctgtcacagcggttaggagtcactttttctcaatctgaaaccactagagtccaccaaggggcgacccaaaacaagcggtgaaacaggagaatctttgcatttgaagaggagaataaaaagagtcgacaaagaaaagtatctagagagtaattcacatcgcgatctcccctcattccttcatcggcacattccacgtcagaatcaggatcaaaatgtgcgatgttatgatcggagttgccggctctccaccttgcctctttcgatctacatatccacttggctgccgttgggcgcttatgtgtaggttctcttgtaagtctagactgtcctttgtttgtctttgttcagctaatcagaatatatccttgtcctggtgctaatttcaataagccacataatattaaacattgaagagacgtcacattcccgaacccgaggaatgtcggcaacaaagcaaatcggggaattatctaccatcgtctatgctggggtatatattctaggaatagacggtgatgatcgtggcaatcccccaactcctacaatgttataccccgtattggtggatagcaaattatagattaggtatcttttgtgtggcaatcctatacaaaaggtacagaaacacagcatagtttaattgttccaaccccacgataatgcagtcatgtgttatattaaaaagccttatttcagtgcagattaaatctttcttctcgcagccgagtctagatccctaatcaggccgccatggttgaccgatatatatatgtgacgggtgatgtgctggcatttctcatccaccaatgttggccctttcttgaaggtggaatgcttatcgcgattgacaggttgctgtccgactcttccaagatttgttcaaatcgtattctttgagttcttgactgttttcgtggttttacatcgtcgtatactcggattccccggacccgctatatatatcaaggtcctttatggagtgatgaacatgcccttatcgtcttcaagacttttccatgggagcaaattcctataatctcgagatagggttgcagatattattggtggtcggaactatgcgctcggggcatttccgatacttttagtacctattgcccagctgtgatgacgatgtgacgttgttaacccgggcttttctgccgctatggcctccgatattttaatgatcttatcagaatcctgattttatctttgtaggttcagatacctaagtccatgatgtcaagcttgggggaagccaaagatgtcaatttatctatcgaagaagaagtgaacgcgagacgaggctattcagcgtaagcttggatgttctgattttatatagcgattattaatactttccagtgctcttaataatcctaaagtatccagaaagtccaaggataatgcattagacctactcaatgatgagcttgacggggacacacctcgacattaccgtgatgaggttccggaccagagtacagactcgagtggtctagttggcgtggaaaagtaagtgatactcatgtacaataccaagtcgattactgacaatatttttccagagctgcacctgagtatcacgataatagtgaaagcgaggatgactaggtggagagacatcatccaggatagaaattgaattacgttcacgcattagcatattctgcaggctataaacaagcttcttcgtagggcaagtgaggcaaaagaaatgaaatatctatgttctataactcttgttcttttcttctactccattggcgcggtcagagtgctttcttcatccggccaccttcggaatagatcctggagatgatccaggggagctgtgagcaggtcgactgcagtctcatagcgtgggttgtccagatcatgtggatgcgagcgagagggcacaaaaatcttagtgcggctcagagattcagccaacttctcgctctcgtcggaagtgagggactcctctaatatggccagatcattggcctcttcgtctttcatatgctgggcaagaccttccatcaacaatgtaattgtagggaagaagcgcggatcggaggagtttagatcctggaaaacgttgagcatttctttgagctatgtcatatcagcatcgctctccatgaaggatatcaacacttaccgctttatgctcacgccgatcatcatctagctgctccttgccagctcgaagcttttccagtgcagggaacactaccagctcctcggcgacggcgtgtcgtgcaagctcccaggtgaactggttctgatatcgggtttgttcatcttgatcttcagagttgacaatgatattgtaataagattcgagtttccggtgatcatctttgatcacgtcgcttatccgaaccatgttggctgatatagtgaataaccttgagttcatcttaacgttgcctttttgttagccgcattttttctggttcactgaagttatcatgacgtttcgagggttctatatagtaatcccagcgtcccgtggaacgtgattccgaactgtacaactccgaacatttactctggttgagataacgtgatcggataaatatgtcttaaagaaatccctaaggacatgctagcttccctcgaccccatgacttggatctgcagctgcctgatatgacgtccgaagtgcggtgattgcttatttgctgctgcaggaggcccgagtgcctgaacggggcatatgctttgccttggatacatctctcgtattccagtttttctttctacctcacctccactttggcatgagcaaaattcgcaatgaacgttttagtaaaaggagaacatgaacaccggttagagctctcatggttattcaaaggttggatgaaggctgacagtactacagagaacagatccctcgtgatatgcctacatacgagcagatggagagtggactttgcggtcgcgtctcccagtggctatggtctggatggcggggtacggcattcgaaggtgcttccccagatttgcaaaagccataccagctgaatcatggggactgtaaggcctgtcgtgaacaacatactacctgtgatcatacacgacctcagtgctctcattgttggtcacagcagctcttgtgcttctatgtggacccgaaacggaggaaacagaaaaatattcggaaggcaactttcagtgaagtggaaacgagttccgggttaatcaaggacacgacagcgtgactgtatcttttgttctcttgctcttattctcctttccgagtatttatatggatgataggtggttgtaggcctaacgtttcgaggctatcaaagtcctatatgtacttacaagtatttttgcatttctaccatttatttttcttttgagatacacattctaaggcccaagttatattccagtctcatttcaacagaattaaacgaggttcttttgaatctcatagagtgcaagctgggtgtaacgttggaaaatgcaagatttggcatcaaagtcgtctaaatgaaccaccacctccaatctcccccacctttttatgagttaccccacaataaaacttgcgacgaacgccgagtcggcacaacagcgcaacacccagagctgtgttcggaacactgtgacccgatacccgctccaccaacttccacataacttgggcctgcacttttcttagacccttcgaggaatacccggatagctgctgaattgctctttgctttttatgcagtatgagtcgttgattgtcaccagccgtggttgaggcagtttgcgtcactatacgttatatccatgtgtgattgattcgaggtgaaatcctatatagaccctcaaggtggccaatctaacctcagcacacagatggaatcggagtaccggcgactagcggatgctatccggaaccaggccaacgctcatcccaaatcacgctacctagttgccatcgccggcatccccggttcagggaagacaaccacagccgaggcagtagtgcaacagttgaatcagagttcgacttcgcgtgctgtcctactctctatggatggctttcacctttctcgggcagctttggatcagctgccgaaccccaaagaggcacatatccgtcgtggagctccatggacgttcgacgtgagccgctttgtagcctttatctctcgcctgcgaacttgggccgacgagaaaccgctagcagctccatattctggaacctggtcgtcagcggatgtcattcgcgcaccgacattcgatcacgaagcgaaagaccctgtggagaatgggatttctatcacgccggatgtagatatcattatcatcgagggaaactatctacttctagatgatcccggctggcgggagcttgctgagcttgtcgactatcgcgtcttcgtcgactctgatccgctagaagcaaggtgccgattggctgagcgacacctacgggcaggtattgagaagacgctggaggatggatatcgccgggtggatagcaatgacttcttgaatgcgatctccattcgagagaaattgctggccccggacattgttctgaaaagcgtgacagtggatggtatatgatatatatcattgatactacatattggacaaactgagcaacattcattcatttgtaactcattactcctttatcatctgcttgtggaatacatctaggtatatttgtcagatataagaaaaagccaggatattagcatattaaactcactcggaatctccggcatccagctcgcccgagcattgcagaagaattccccctttgggggtaatgcttctgggtcgtccaaggatccgacacagatgtagcgaaaatagtttttggcagcatcctgattccatttgttagaagacatccgtacccattgtataatgctgacataccccatattccaggatgaagctaccgcaattttgacaaaattctcgatgaataagagctccagatccgttatctgcgacatgctcctttggtacccctttagtaagattgaatgtatcctttgggactttagctgtcaggccatagttagtcccaaaagctttctgttcaatgattttagcttcggtaaaatgatatccccgttcaattcaaagtgtataccttgcagttacggcaatggcagagagatgttctcgcatcatcaatcgaattgagcttcagctcatactcgatatcccggcaaatacaagatcctgtgagagtaggcatgttgaagctttggatcactccgatattcgtgtgatatttcacgatgacgtcactagctttggaggtcacaccatctgatttctggcatgatgatggtgatgagcttagaaaacttaaaacgggagagaagacatctagaacagcccatcaaaaatttgacaaagctgtttatcctagtgagctgtcaaaataataatagaattgtctactaaagtgatgatgtgatgatgacggcgttgatatccggggcgaagctttgagcttatctttatcaacctttcttccgcagatctaataccttaaaaaacttatatctcaaacatctgatacttcaacgtcctacacccgaacagcaagatgaagtccttgaagccaagatcagtggtatcctctttcatctgctcaaatgcaggagaacccaaaattgccatttttcggcgaagtgataaagtcagcacatatcagtatgtatcctcaagtcccactttactataaattactgtagtccagatgaactgatttctctaggcaccacctcgcccccatctcgggcagtatagaaagtcccgaaagtccactagcagcagcatggcgggagttaagagaggagactactctcacctcacgagatatggagctttggcgacagggaaaggcattcacattcagtgatccctctgtcggtcgacaatggaccattttcccgttcctataccgactcaaagactgcagtgaaggtggccgcggcgaggcgggtcttcaaattgactgggagcatgaaggctggcagtggtatagtcccgacgcaatccaagacgatgacaagtttggtggcgtaccacatctgaaagaaagctttcgacgagtctggttcgaagttgacatgaatgatggcgctagcaaggcactgataactggcctgaaacagctaaaggcagatcatcagagcggatcgcacgagctgacctcgattgcgctgcgggcctaccgagatgttattgcgcagatgcacgaggatattgacacgcagtggtggaagaatgctcgcatggctgcatggcatctgtggaaaaatggacgagaaagcatgggggcagccaccttgaatgcatttctcggattgctggccgacatggaagttatcatacatgagaatctcgactccacggtcaaacgggaacgcttgttggctttgatcgaccagcatttggacaagcgcaaggagatgcccatgcgcatcaagcactcctttgcgacctatcttgaatccaagttcttgtctacaacacgctccaggcctacgccctctctcgttattctcaccctctcgtcgagctctaccatccgggacagcatcatagaagccttcgcgtctcttccaattcctaatctggatcttcgcatactggaatctcgtccgctttgcgagggggtcaatatggcatcttccatcctctctgccttcaaaacgagatttccctcatcttccgatcggcatctcaaattaactgtgtacaccgatgcatccgccgctcttgccagcaaggacgtagatttcatcctgctaggggcagatcggatctcggattcaggctcagtgagcaataaaactggatctttgccagctgttctgagtgccaagcatgtctgtcctgccgccaaagtcttggttctcagtgagctggagaaagtggccgagcctgacgccgagagcaatcggagccaggaagagaatgatccgaaagagctggtgggctgctgggtggaatatggcatcaaaggacttaatgctattgccgagggaattgatgctgatcgagataacacaaactacacagttgaaattaagaatatttacttcgaatgggttccggctgaactcatagaagcgtatatctgtgaagaggggactttggacgccactgctattcaagagaaggctcaacaagtaaagcaaaaggcggacagatactttggtcaactttgagtggaaattgattccagtttacttctgcctttccaacattatgtagtcgtgctattccgaatgacgtcacagtttgttgctgcacgaaataaaagttggtttcgattgcatattcgacctaccatagctagatactacatctgactctttccaaatgtcggaagtactcgatccaggaatccacacctttagtgttccggccaaagagttgatatttgaatatgtggtccgtcgtccattcaccgaaaaggaagatccacgtaatatcattgttgttcaatgccctggctggggcttaggatctcaatatcttcaaaatggattgcaagggttgtggaccccagaaggccataccagtcctgcagttactagtggctatactgtcatcttcttccattctcgtggaacggatggatcatcccaaccactagcatcccaaatgagcagtatgcccgatcttgcgtccgatttggaggacttgcggcagcacctgcatctcgagcaatatccggttttactgggccactccaacggcggggcaattgcgctagggtatgcggagatgtatcccagtcgtgtcagcaagctcgttctcctcgatcatcagctagtaggatttcgggataagagattgttgcagctcgaagcgacgcgcatagatcctcgataccaggttgcttgggacagtgtgccggatcggcataccgaatctgacgaggaatttacagcgtcggtgagaggcatgtggcctttgtgcttctttgatccgaagcagtatgtaccagagctactgcgtgatattggcgatcggaagctgtcgggttggtgccaccaagcccagggtcgatgtgataagaaattgctgcatccaatgcaaatggtggagagactgagggatgtacaggcagaaacactcatcatattcggccgcgatgatatgatctgtggaatagggataggggaacggacagcaaaggatattccaagcgcccgactgattacctacagtgaatgtggccatttcccctggattgagaaaagggaacagaccatattggatatccgtaaattcattgcaaggaagaccagcatatctctcagaatgtaaaccaaacagataaaatgttgcgagcctgctaatgtgcattgattaaaccaaatgtatcattgtccatacagtaaatcacacgctaaggcggaactgaatatctccaagggctttggtaaaggagaaaaaacatcaaaaacccgaccaagaccatagggtagaggacaggatcgtcaaagacccctaccccatagaaaaaaccaacaaaatatattcacggaaggaaaaaaggtatcatcataatcaggtgtcacgaacacgcgcctgtcgctttgcggtgccaatgtgggtgttgtgcactttcgtggcgaacttcaagctggtcaaggtctccgacatatgagcctggagagggctgaccataacgaacatgagagttttggagtttccacccaaggagaactggagcaagtaggtgagctggaggataagttagtatctggcgaagaaataaatgttgaaaaaaacataccttgctgttccggtatgggatgtgacctccctccttgccttggccgagagctgaaatcacatcgcccagagagctgagactacggttgatgttttgagtctctttcagacgctcgcccgtcgccccactgtgactcagacgttcacttcctgccaagtcaaccaggtttagggtgccttcgctacgttcgccggtgatgtggttctggccggtaagcttgagaatgaagacagagtgggaccgcgatgagcgctcgttggccttggtcgctgctaccgagcggttggcatccgcattcttaagaatagactcgaccatctcgggggagtccaaattgactgttgtaatgtcggtgatagtagttttgccccgctgcatgtcatggcgaatctcgtgcttcttcttgtccaattcatctgggttgcccaacagatcattgaggttttcgttgtagacttcgacaaagttgcctgccattgagtaccgccaacccttctcttccagaccttgcgcggtctcgtaaatctggtgaacagcacgagggatcatgccgtcggccgatgacattgtgtgtgtctttccactaccagtttggccataacagaaaatgcaaacattgtagccatccagggcgctctgaacaagctggctaatctcatcaaagacctcggcgttctgtgtagatggattgaatacacgatcaaacgagaaagtgttgttcttcctggtaactgttccaaggctggtcctttcttcgggaccaagaatattaatctcctttccatcatcagtttcatctggatactgcataagagtgagatcggaagtaggttcactcttaagcgaggggcgaactcggcagaacacgcggatgttgcctttgagctcttgcacctggttatgaagtttgcgtcgaagtgtctcttccctgcgcagcttctcttttatcgcctctgtctcggcaaatgcatccatcatctcccgattgcaccgctcaaaggatttagactgctcctcccgtccactttcaaggaactcgatgcgtgccttgagagcacgtattgatgactctagcgtaacactgttgctacttgtggtatccaagttgagtttgagttcttgcaccatccttcgttcgcggtcgacctctgccttcagggcatgtagcccatccttcaatgttgtgatttcgcggtccttcctttctagctcaatttgcgacttctgaatgtcaagcgcagattgggaagtcagcttgccgagcgcgcttactcgtgctgctttctcgtcttcaatctcacggtcaaaccgtcgtttcagatcgcgaacctcctcttgatgtcggtcagtgattgtggcgacttcccttctgctttgttgctggagtgaatccaattcaatacgctggcgctggtaaagatcatccatagcgatttcatgctctcgcttgtcctctttacgcgcctgctctgccgtacttagatgatttcgcagcgaatctaactccaccctctgggtaatattgagttctttcaattcatcccgagaggcttcgagctcgttgactagatgaaaggattagattcgtctcaacatagcccttatcagactcaacttacttctggacttgtagatctcaagtgtctccttgagaccggagcttgcttgaccttgttgatttacctgggccataaaagtctgcatcaatccctccatactcttttcgcgagaagcttgatcccattccgggcctgtgatattgtcaaaacttctgatcgaagaacctttggtcaaaaatgcggggtgggagggcttcttgacaatgcgccgctgggaatatgatggtgttctagggggtgcagtgggagcggtaaaataagaagaagaggacgagaatgaatgcgcatatccgggtgactttggggtggtaacagtggagacattccgaaatggggtactgggcaacacggggatagttgctagattggaaggctttggcaaagagacagggttctcagacactgggagcgctgccaattcactaattccattccaaccttcatccaatccgggggaaacggttccaacggggcaagaagggatacggctgggagatgagagaaattgtagcataccctttcgttttcctagcacactgggagagacgtcttccatatgggtatccaaggcgctcgctgcgcgggggatcgatgcgccgacgggtctgcggccgataaaggacgattgatgccgggacatggccgatgctgggcgcgtgccagggccgacggttgaggaaaaggagccgttggctgcgcgggatgcaggtgcaatcggccgggacatcgttgaagacgagtacgagtttcctcggctatgcgccctggtcgtggtgctaggctgtcgagtgacggatccaggtctcttgatttccgggtttccggttttcggacgggttgcttccggtgctgtcagttcatgttgctccaacgagtcaggggcttccatacgcgacgtgctgatagccttgtttgcgattgtacctggcgccatgatgccagagcgcgagttggttgtcgcagagctggcttcacgtaggccggcctgtggtagccgtgtccgagtagacgacctggttctggtctgaagatggtcagttatatccgcaggcactctgatgaaactgaaacccacagtggggtacttactatgttttcaccgtccatcttgggatttgttgaccgccaggttaccggcgaaaagagtatccgggcgagtaggaggagctcacgtcgagccactgtctgtgttggccgcttggacttaaagtcagcggaagttaggatgaagccagcagttatgttacataccaataaatggtctgggcagtaacctttggaagtatgagtatcaaatgagcgcaaaccggtttctagagggacgaaatgcgaagtaaacaaagatttgctgactcagacatgtgtatgacgctagtccatatccggtaatagcatcagctatcccgtattcgtattaccaaggaagtatttgaaatcaacacgtgatcaacccggaaaccaaagatcaaaggcttcaatgtccaaaatgaaacaagcacagacaaaagaatagattatccgaggctagagacgaccaatcctgttctttgttgactcctttttgaggttgttccgaaattagtagttgattcgtggggcgtctttacctccactcgaattcccgaaacagcggccccagtagccccgttgcttgagcttctccaacatctccttcaccaactccttttccttgctctacttcttttttgtttgctctacgtcttcgtttgaacacttggtaatcatgtctgggcgttttgttcgttcctccaaatatcgtgagttacctctataatccaacatgcgcctccccgctgaccgttacaggccacgtcttcgggcgatcgacgagaaaggtaaaggctacctcctataccaccggatctcctattctgactttcgcaggatcaatgctacgataatcttcgagtctcccgaaacgcctgggataccaacctcctcaaggtgtgtgttttgccttccgcatcacccctgacgtttcactggcgaacccggtcttacggcgcatctaggtcaacccgaaacacattgcggtcaattgggaagcaggcggtggcggagcttttgcgattattcctcttgaggaacggggcaagctcccggagcgcatcccattgtgtcgaggccacactgccgtcgttttggacactgactggtaaggaattcggatatagaacccccgcgtcgcagctcactgaaaccctgcaggaaccctttcaatgacgacctgattgcctcgggatccgatgacggcaaggtatagtgcgaataaacaacagctatcagcgttgcgactaactaattccaggttttcctctggcgggttccggagaacttcaccgttcggcctgaggttgaggccgatgacatccaggatctcgcgcctattggcaaattgagtggccatcctaagtacgaatccttgactaaacccgttatggccccatgcttacccctccccgcaggaagattggccacgtgctcttcaaccccgcggcagaaaatgtgctggccacggcctcgggtgactacaccgtgaagatatgggatattgaagctggcgccgcgaagctcacgctcaacattggcgatattgtgcagtcgcagtcgtggagtgccaacggctctttgttggtcactacctcgcgtgacaagaagctccgcatctgggatgtacgacaggaacgaccggctcacgagaccaatggccacaccggtgctaagaacagccgagttgtgtggctgggagagcgtgatcgcattgcgactaccggtttctccaagatgagcgaccgtcaactggcgctctgggatatccgtgccatccgggaacccatcaacggcttcaagaccttggattccatttctggcgtgtgcatgcctttctgggatgatggaactaacatgctattcttggctggacgagggtgagtgcccatgatttaatccttaagccttcgcaatttctgacaacaagcagtgacggcaatattcgatactttgagctcgagaacgacaagttcgagttcctctctgagcacaagtctgctgacccccagcgaggagttgctttcatgcccaagcgtggcgtgaacatgcatgagaacgaagtcgctcgcgcctacaagaccgtcaacgatcaatacatcgaacctgtctcattcattgtccctcgccggtccgagaacttccaggacgacatctacccgcctgcggccggtgtgtcccccgccatgtcttcgtccgaatggctgggcggcaaggaggcactgcctcccaagatctccatggccagcctattcgatggcgagggcatcaaggaggtatcaggagtgcaagaaaagccgaccggctcgctggatgcccccgcccctaagcctgccgaggcacccaaagccgctgagactcccaagactgctgagcctacgcccaagcctacttcttcgacggcagttcctaagcccgtctctgaacctacccccgccgcgcgctccgccccttcgatgaaggaacagggtgcttcaatggctgccatggtgaacaagttcgccgatggtgaagaagagactactgtctcagacgatgacaactcgagcttcgaggaagttgccaagccggtggagcgtcccactcgccctgccgctgccgagtctgcttcgcctcgcgtgagcagcccgttgaggccgaaggaggttgagacaaagcaagttgaggcaaagcaagtcgagacaaagcaggctgagacaaactctcaacccaccctagttgtaagttccccgctccccatctatatttgtcaaattgtgccagctgctaacttttctagtcctctattgtcccatcacccgctagcgagactccttcgcccaccacttccgtccccaagaacgacatcgagctgatcaaagacctgatcgccgaacagacaaagacgattgcatctcaggcactgcaaatgcaaacactgactgccgagattgaggcattgaagagcaagctgaactgaataatgtcgtcctaattttggtctctggagactactaggttggtcaaatatcatttaggtacattcgttgttgggagattacgctccgtattggaatcatgcggtgttcaacgtatatgaggcggtgcagtgtgtggataggtttttttttttgtttcttttagcggaattgtcaatacatttgcccattaaaatcaaaattcggatatgatgttcagtgaaaagccagctagcccgctagaacactcctctacggcagtagattggctttatggctcggagttaacacatgtacggagtaactaactgtaagctaatgatatattaatgggctggcaatatgctactagatgatttgaaggtgttgctcctaaatctcatgtgattctattgagagtaacaccatgatatatactagtgatagaccatgttagcgaagataattgtattttcctcttttactttgaatgatcgcagcaaagtagagattagagtaaagaattcatttccctcactcggagttccattggctctatccctaagaagccatttcaaatagcctacgcaagtcccatatctactgttgagcaagttcacatactagctcaagggaaaaaacaacatacaagaaggtaaaaaagcaaccttgagcccttgacgccatgccccatgattttgtactgaagggaaaaaaaaatcgaactccaagctcagagttcatcttcgtacttgtagttgatgcggcggcccgccaccacacggtcctgccggctatcacggcggcggccagacgacttggccttgtcacggtgctgctgctcacgctcgagacgctccttgttgcgcgcttcacgctcaagggtgtaagggtctttattgatctcggccctcttggttgaggttccgttcgtgtcgcgactacggtcctcatcggcacgtttcacacgacgggctgggggatggtcgccgccgatggcagacggggaccgatcacggcgagagcgcttgcgatcacggtcacgatcacgctcccttggtcgatctcggtcgcgctctgaagttctgtctttatcgcggtcgccatcacggcgtcgttcgcgatcggaatcgcggtctctgccacgtcggtcgcggtctcgctcacgatctcggcgtcggagatctctgtcctgttctcgtgatctgtcgtcttcgcgtcggcttcctctgtccttggaggagcggtaggtgctgctgattcggcttgctagatcgcgcgaccctggggcttcggaggatgctttgatcctgccgtttgatccatctttctctgcgaccttttctaggcgatcagagggacgggaatcgccctttcgactggagctgcggctacggctgcgatgacgacgggagcgttgcgaccggtgcttgtctcttctatctcgctcccgatcactgtcgtgatgtcggcgccgcgaggatggacgagaggatgtgcgggatggagagcgagagtgccgggcgacggattgtagctcatcaacccgatctaggcgtttggtctctgccccacgccgactgtcacgatcgtcttcagtaccacgaacagatggtgaacgggggcgagaagttggattttgcgagggagattgagatcgagaatgcgcacgttgggacagagcgatggatgtagcctttgtgcgattatcctcagagggttcactactggtcgttagcatttataagacaaaaggaaagatagaagaggaaagtctcaccaggagatactgcctcgaccctgaatctggaagccacgttgtcgcagaacgctggtgttgggtagcccctgccgcatggcacgcggagcagctggagcgccttcgacgcccggccccggttcttgtccatatcggccatacctgtattgaccatactcattactcatgtgaccgtatccagggccagttggtacagaattatcaaggctgtcaatggtgggaattccttggggttggtctgtggggatatcttctggattacccggcacatcgggtccagtttcacctgattctgcagtctcatctgtttggacattaccttcagcatccattggagtaccgttgaggccattagccatgcttgggttctggttgacatagcctgagttagcctgacggtaatgaccttgcatgggtccaaagccacctcgaccggggccatgaaactggccacggccgcgacctcggtatccaccgcgaccgtaaccgccatagtaaccggactggtagtctgagtgagaagggtaagcagacatattagacccgccaaatgcacctccataaggaggacccgtgccatttgcgaaagcatttggattgaatttattttggccgccttgccacatattgttgttctgttgggatgcgtcccatcctaaggatccatacatgcccccgttgtagttcatcccagtgttcatgcccatgccagtcatgttcattccgtacatcccctgacttgccatcgggtccatccccatcggcatacctgtggagagattagcgaggttgaaacggcaaatctgggtaatattaaacttacccatcgtattcgggtaattgaacatgccagccatgaaaggattcatgccgtttccgttccagcccatcacggggaagtttccagccacgtttgagataccggattccccaggaacctccccaggagcgggaacaggttctccgttcagcggggtttcgttaactgcggcatcttcggtcgtcgattcaagggccgtttcggtaccgttgagttgatcaccagttgcctcgggctataaatagggtcagtttagaaaaagaagagttaatacagcagtaaaaaatcacctgagctggttcatttgccaaacctgggacacttgggtctgcaatgctctctccaactgtggctggcaccgctgtgtctggtcccggcacttgagacttcgactctgtaggctccgtatgatccgccgtctccacagatgtcacctgctcaaccgcattttgctcgggagctgccgatatttttgtatctgcaggtgtgatactggatggtgttggaggcgctgtagattgacggtccttttcccgcttcttctcttcggtgcgtaggaaagccttgagcgtggtccgcagagccttgttgggtttgcagagatcgggcgagacgggggtgtgtgtacagacaggacatgtgtccgagagagaagcttggcctataacagagatcagattagctaccatttgcgacaggtgcggaactctccaacatacaggtctcacagatggactggtcacaacaggggagacgaaatgcgttcaccgccagcttattgcacatggcacatcgcagcttgaaggggatctcatcttgggccagggtactgccgaatcattagcatcgcgaatttttggtcggcatatgagtactccgtacctggcaatgtccatgagagctggcacatccgccaccaccatggctggagatggctggagatattagatgagctctgactagacagaaagctccagtgacatggcttcaatgtccggtaaaaaagtgtagaggttgatgctgtgaatttggtcggaaaaactatttagccgaagttacatgtcagagagaagtaagccgtgggcatctgggaactaagagatgacgccgagcaaacaaagtgcattgtgcgatgagaccctcagattagatcaagttattttgggcgttcacagaagaacagcgatacgctgacggtttcatctggttcaactcgacgttttttgcatttatcgtcattgggtatttggtattctacgggtgcctagagggggagagaaagggtggcgacctacgatgtatggacaattcagtatattgagaagttgaaggtaacaaagaggagagggagaatacaaggcaaacaagggggagaagggatcgaattgaaaaaaagcgacaaaaccgaaaattgaaaaggtgaagaatgaaaagaatgaaatttcaccgagagaagaggatgaaagggcaaaataacgtgcgattttgcaaaaaaacagaccaaaacagtcagacgcggtaaacacattacgaaaaaaacaacgatggaatttaaaaaggacagcgacgcccgtcgtcggactctcctctccagggagcttgggccacctacttttcgcgattccacttaaatctttttttaaattttttttcgcttgaccatgacagagaacaattatcggcctcgctctcctgatctatctcttcctcctcctcaacaatacgcgcttgcgagtccaattacatcccacgaatctcccttcttcaactcataccaacctcaccaacgcccaattctaagtcgcgtgggtcaacaatacgttccaccttatcagccagactcggacatggctcgccgttctagccgtcttgctcagtccgaccgtacccccatcccagaacccatgcccgaggcaattctaccaatcccagaggcaatccaaccaatcccagaggcaatccaaccaaccccagagccgatcgcaatggcgccggtccccgctattgcgccggagatagaggaagagatgccaccggcgcctccgagtgcggcgattgaagtaaagaccaagtttcccgtggcgcgcatcaagcgcatcatgcaggccgatgaggatgtcggcaaagttgctcaagtgacaccgattgctgtgtgtatgtacgccctttgcgctccccttattaccaatctgccagagatactgactagactcttttgatagccaaggctctcgaactcttcatgatctctcttgtcaccaaggcggcacaagaagcaaaggaccgcaactcaaagcgcgtcacggcctcgcatctcaaacaggccgtcgccaaggatgaagtgcttgacttcttggctgacatcatctccaagatccctgatcaacccgccagtcgcaaacacgaagacgacgggagcgatcaaaatgagggtcgccgtaagcgtggcgggcggcgaccgaaggatgaaagtgattgaggttgacccgtaaatgacttgacgacgtgctagatgggatgggtattaggcgcataacttcatggtggttctttctttcaggcgtttaaatagtgggaggcagatctgggagcgcttttgtctgtgaatatcttttggtttttcgggctccaatgactcgagcctcatacgcgcacggtctttttattcaaacaggacctagacgggcatcttctgttggaacttgaatctgtatgactgtaagtgtaaatctggaatttgcatgtagtactccgcatatgcttggaagttgatagttgatggtgggtgtaaagcggcgatcagcgcgataaacaccgtatccactcatcctcgaccccccgtcactttcactctgtgagatcatgcagtcctcacagaatggactttgtacgtgccccttacttctctatgatcttcactaatagaatatagtggtctcgtcttatcggcggctcgcgcgcgctgtccaacaaatcctccaaggccacctcgcccacggaacggctgactgcatttaagcgcgcctgcaatgccctccaggtaccgacgatgtccgcttccaccaggccaccaattaaccaattgatagcaaatatggcgctcgacaaataccccttcgggcgaacaatcggttacgcatgcgcggatgtacgttgaacgactcaactcgattctgagcgaggaagctcgcggagcggcaccacacccctgtgtggcctatgcggcatcatcccaggtcttcgtgaccgtgaccaagcttgccctttccttccacgatgaaggaattatccgatcagcgacggtattcttcaacacactgatcgatgcagaggtggacggggtcgtggacaaccgattgttcgctcgtgcaatggtggatctggtccgccgcgccgagaagacctccgatgaggctgagggccgactcgtcgaattgctatttggtattgccaacaacattcgtctgcaacctggtatcctgcccgcgtggtttgtgcctcgggtgacacccaacgcccaggatagcgattcccaagccccaagtgggacggagtttgcaggagctacgaggaaggacgagttccctctgttctatctgctggtagactatgttcaccacgaaggacgcgctggggactttgcccgaacggggttgctctacctcattgaaaccgcatcgcggtctaaaaacctagagaaatggctgatcgagagtgacctggctacgctcatggctactggactgggcgcactctacagccagctcggacagtgagttcggttctttgatcattgtgggacaatatactaatcgaataaagcttgtcgtttactcctgccgccgaggacgataaccttcctcacattgttgctctatctgatcatggcaaacaggagaccgctttgcagccaaccctaggtcaaacaatggatgctttcatgtcctatctgttgttttggcaggacacaatcgaccactgcaaatctgccgaagtgaacgacaccttactagaccatttccaggtgctgtttctggagcaacttttgtgagtatacactcgtcaccccagaatggacttatcactgacccttgcaggtacccctctttgctagaatcatcagatgtagctggtggctcgacagcagcggtgctgacctacatgtgccgcattctcgactcaatcgatcaaggcgaattggtccaccgaatcttacatttcttactagcgtctacccctcagcctgaggagcaaatggatatgtccgcaagccgtcgcaaatcactcaatgtgctagctgcgctggcctccgaagcggctcatccctcaccctcactattcaatcttcgcgatttggccctactaggactccagtcatcgaactgccagacggtattagctacactacgccttttaaataccgttctccagagacaccatctattcgcacgggcgctgatccataccattcctactcagcctgcaaatcagcgccccgttggcgccttgaatgccgagctagagcaattagtagtcatgggaacgtccctcgttgatgaccccacgctgaatgagtcgtatgacaactatgtttcagatgcgacatgcgtgcttgaatcccgcctgtgtctgcccatctcttcaatgggggaagacgaggagacgttacctctgccattgcagctccagcaagatgatcccatagtgcaggcccttttcgagtgccttgaaactttctttactaacagtgtcatcgtcaatctggcattgacaggtgtgttcatgagtctggcatcctcacatctcttctccttggacgggtgggtgttggttgatcccaaccaatacggggccccatcctcggaagaaaccgacgacggattggatgttagccgggcctaccaggccccaacttggcctgccacggctgctccgacattgacactagcgctccaaaaactcgtgaaccaggtccgacaatggcaacaagaactccccgacttcgatgtactggtcgctgcccgacgagaactcttgcaccaggatgatcgcccacaaacaccggaccgatcccgagagtcctcagagcatccagcgtcaaccaataattcgcgcccgtcatattcaggttcagccggtgtctctaccccagctgcccgtggccggtctccatacccggtcaattcgccctctatgctttctcatcgggatgcatcatctgtcccttccgagtcgcgcggatccttgaacgcccgagcggtggccgccgaggctcttcgccagcgccttgccacaccgttcccgcctgcacccgcggatccaccgtatccatcgactggggaggaaccctcggactcagaagataccaagcaggctccaatcgcaaccctcggtcatgtactgacgaatgtggtcattctttacgaattcctcctagagttgtcggcggtagtacaagtccgaggaagcctatttgaagaggcaggatatgattttaattaggaaaaggggtgttgatttgtttttctttctttgtatttaaagggggtatacctaagtatcaatatacagtattatttttgtctcttcatgaacaatctatcaaaagaccaatgaggaatttgatatgcaactcagtgaataagaatagcaccagtggacccccgacgacgctgattggccactaagcccctggacgagagactatgaacccgccaagccctcgtgccgggttggcttgcggcgattggcgacttggcctctagacacgtcggacacaatttctcactcctctctaacgcatttctgacaatgatttgatactagccctcatttatacatcccgatcggactaccttcttttatatataccctcattgacggtatgactggccgagatggcctccatacgtcatgagtctcttgaccgtgaggaccgcgaggatgccccattcctcgactcccccgatttaagcaccccgggctcagcccatcgccatgtttctagcaagcccagtataggaagccacccattcaaggccaatgcctctgctagcaccatcacctttcgcctcaaggtgaccctattcgccatggtcctcgcagttgagatcggctttgctttcctggagggccccatggtccgaatcatggagtctattgcttgtcgtcagtatttcttgggtgtggatccgactaagatcggtgcggatggacaagtgcccgaggccatgtgtaagattggcgaggtgcaagctgaactggcggctgtgaagggctaccatatgttctttgatggatcactgagtacgttgattggaatgtttagcgctagactatgatctaattgtttcgcaggcgccctattggcgattccctatggtctgctggcagaccgtcgtggccgcaaatctaccctcgccttgtctcttcccgggtttgggttgaacgccttatttacaatcctcatattgtggttctcggatatatttcccctgcgtgcgctttggtttactgccttgacgtggttgtttgggggtggtccagtcgtgtcgttcgcgattatctggaccatgatggccgatgtaaccaacgagtcggaaaggtatactactcctccatgttgggcgtgagtcttatagatgctgatcaggtggaacagagcggaactcttttttcaatttgccatcgtatcgatgggtgccgacttcgcgtcaagtgctgttagttcttatctgatgaccttgaatccttggataccgttggtggttggattcgcaattgtaatggccggaatgatgctcattttggccctaccggaaacgaagcatgcactgccaccccggaaagctgaaccaactcatgtggagatgtcggatttgacacatgacaccgagccgaaaaattctatacatatccctcgcgtacccgaaccatatcgcgcagaacccgacatgaatggtgatcatgacgacgaaccgccttcttggagtatccaatcatactcgcaccgatctattctggcaaagtttcgcgcaaattaccgcttttaccttagaccctaccgcttcattctcaaccgaaaaccagtgctcctccttctcactgcgttcctagtctaccgcctgagccgaggctcatcttggttcttgacccaatatatatcgacacgttattcatggacactggcacaggccaacttcttggtatctgctcgtccgactgtgtcaatccccctgttcctctttgtcctacctttcctcaaaagacgagtcgtgaatccccgactttcctcaacagaaaaagacctctggctagcgcggcgcagtatattctgtcttactgttggaaccctcggaatcggcctctccccaaccattgcgaccctgatccccagcatgattgtccagacctcaggatcgggcttcgttttccttgcccgctccatcattaccactttggttgaacgtgatgagactgctcgcttgtttactgcgattgagattatccaatcattaggaaatgtggttgcgagtttatccatcaccaccgttttccagattgggctgcgtctcggtggagtttggattggtctcgcgtggatgatgaccagtacgctcttttgtttggtcggggtagccatctggtcttttaatcttcctccaagtcctccgacaccggactttgcggaggattatgacggggatgacagggcgtgaatctatagatcttgtatactactcatagcttccgtgcgcacttagagcgtttgttttttagtatctattatattatatatagcgatgtacgaaaataaccaatcagatagaccaaaactcaatacaagagatctatcgacgtaactcgctcgcctgcgtgagtcttacacgccgggaaaaagtgccgaatgcctcaggcataatatcacgtggcagctcgtctcgcatgtgattatcaccagcttgtcgacccgattccattgtcagaattagcccgagttcgagttgcaacctgtgctgccagcacgctcctaaatatacacttgtttagcgcatggcgtgttgatgattgggcctgtatcactgctcattctgcctaaacttgtcataacacgagatggagagatactcacagtttcgggatcgaggtaaatttgcgctgtgctaaccagcccccaagtccagttatactgacatctctaggctcgggaattgcacccttcctcccgatccccgttgaaccactcggcctccaaacgcctcttcgcattttccttttctgcttccgcctcccgctatttattttcgtcactcttagctattttttgatcctacaatggcttcctatcggatcgctgggcaaaaaggctgctttgtggtgtatacttggagttcccagcatctggtggattgaccttcaagtggacggagtgcgcaaagggttcgtgctgcaccatcgaaactatagcctgttctgctggtaactaaaatatccggcacaggtctttgaaacagcagcaagcacgtctgccccaacccggctctgtcatcgcctcgtccttcacatcacctattgatgccgtgtacctggcggctatcttcgacccgatcttcacagcatcctaccccaacactcgccaggtcgagcgcatctctctgttccaagccatactgcgagccttcgcttcccccgcaacccaaccggcccctggtgccctgatggtggatgtctcaagcttggtcgagaagtaccccaacaggccgattgtattgttcccagagtgtaccaccaccaacggccgtggcatcttgaccttgagcaactcccttctcagcgtacctcccaagaccaagatcttccccgttagtctgcgctatacgcctatggatatcgtgacccccctccctgggagctatatgagcttgctgtggacgcttcttggcaagccgacccactgcatcagagtgcgcatcgcggagtgcatcacaagaagccaaaatgccattgatacggctccctctctggcgactgcgaagtcgacctataatacgaattacctggacacactggaccgggacgggcaagaactggcatcgtccagcgagaaggcgctcctggataatgtgggcgagtcgctcgcccgtcttggtcgggttaagcgggttggcttgggggtgaaagagaagcaggaattttctcgagcttggagtaagagtcgtcggacatggtgatcttgatacatagacagtatttctttcgctatatttagacccaaacacattgtttcactctcgccaatgctgcaggtacatggcgcacatatgcagttcgcgagttgaatctaatttgctagatatagaaataactgtagaggatggatcttgatgaggatgaatatttgacctggcttaggcttggtttctatttaggtacgaatgatatcttcgtcatgtggctcgatgacccgtcgacacgagaccttagcaacttatcttgaacgtgtcaatcgtgctgattggacctgggaatagttggttgtaaattgggccaactcacgaatattgtgtaccctctgtcataggagcaaacgagattgcctcaacgcttgagacagaactagacctacctgatatgggtcctctcgtttgattctgtttgaaccttctctctctgtttctcagctccttactgtcttcctttgatcgatctgcatcatagatctgagggagaaaccaaccatgcttctaaaactattttttttggcagtcgctgcatcggtggctcttgctgcctccagtgaggcattgaaacaatgtctcgagaatgtgttcacagaccgagcaggctttgccttcgctggagatctattctatgaccgtattgtgaatcgctacaaccttaacattcccgttactccatcagcgttggctttccctacgtgagtactcttgaaagaatgatacattgtgttcctcgctcacaacccacagctcttctcaacaggtggctgatatagtcaaatgtgccgcggataacggatatccagtccaggccagaagtggaggacacagctatggcaactacggtgagatcctcaaattacagtagcacagtggaatcccacctgcaggctaacgtgttatacgtgacaggtcttggaggggccgacggcgccgttgcgattgacttgaagcatctccaacaattctccatggacaagacaacttggcaagcgacaattggggcgggaagtttgctgagtgatgtgacacagcgattgtcccacgccggaggacgggctatgtctcacggaatatgtcctcaagtcggttcgggaggacatttcacaattggtggtcttggtccgacctcgcgtcaattcggtgccgcacttgaccatgtactggaggttgaggtggttctggccaactcgagtattgtcagagcctctgacaccgagaataaggacctcttttgggctatcaaaggtgctgcctcgggctacggtatcgtcacggagttcaaggtccgaaccgagcctgagcctggtactgcagtgcagtatgcatacagtatggagtttggcaaccccacgaagcaagcgaccctttttaagagctggcaggccttcgtgtcagatccgaagttgactcgaaagatggcgtctaccctcactatgcttgagaatagtatggcaattagcggcaccttcttcggcaccaaggaagagtatgataagttgaacctaaccaacaagttccctggtgcaaatggcgatgcattggttttcgaggactggttaggtcttgtcgcccactgggctgaagatcttattttagggttggccgctggaatcccaacaaatttttacgcaaagtctacttcttggacacctcagaccctcatcaccccggagaccgtcgacaaaatgttcgattacattgctaccgtcaacaagggtactttaggctggttcctgttattcgatttgcagggaggctacaccaatgacatcccaactaacgctacatcttacgcccatcgtgatgtcctcatctggttacagtcctacacagtcaatttcttgggaccaatctcccaggcccagatcgacttcctcgatgggctcaacaagattgtcaccaataataagctaccctacactgcctacccgggttacgttgatcctcttatgcccaacgcacccgaggcatactggggcaccaatctcccccgactgcagcagatcaaagagctagttgacccaaacgatgtgtttcggaatccacagagcccatcccctgcaaacaaggagcctttgtgacaaagcatcgggtcttttacattcagaactagtcataatcaaatcattttgtaaaagggtttagaaacataagaccagaaatttgatttaataaagaagacatagactagtcatgcgttattccttctcgcttttctgcttcgccgcccactcttcactctgacgagaagtccatttccaacgaagtgcccacatctcttgatacaacttctctgagcaatccgggcacattcctgccttctgaaaaagtcgctcttcgggaattccaagaatgccgatattgagagctcgtagaacaacccccgagcaacgctctcgcatgagaaatggcacgccgaactctttacagcgttcaactcgtccgaaatgaatacaattgcacatcgtccacatgttataagtctggaaacacattttgaggctaattctctgtagctgagtcaatgggagagatacagacccggtatagtatacttaggggttctgttgctttgctcttgaggctggcttgtgattttggtagatggttatatatttgcggaatattcattgatctttgaagacttcgggtctttcggtctcttccttgtttctttaacacgctttgagctggtgagacatcagatcaacaaagacatacatagaacattgtctcaaaagccagaaatgaaaatgatgataggagtattctgtataacaaagtgtgaagttttgggtcattagttagctcaatggtaaatggtagccttttcagatgtcttttccgtatcttctgtgaaaacaactttgctacgtataaccttgaaacactaatattaaataaccaaaaatagcgagtaaacaaatctgccgcgtatgtaaaaatagtaaatgggtattgggtatttcaaaagctgctaatgggaacaaaacctctatacactaagccatgatacatcatgatcgtctggtcaaggcatctctagccaaagcatcaatgcgacgagaatacaagtccatgaaatgcataacgggatcaccaaagaccacacctcggagctcagtgtctacgatcccacaggcatccacattctcccgcggtggcagtgcaggagggccaccagggaccggtggcgctacaaacacaggttggctagtcggttggtctcgcggacgaagtagaacaagccgaccagcgagtgacagatcggacgagggagtcctccaatatataggagcggctttcttcttcttgtcgtacaaggctagtactgaccccggagcgggcgaaacatacagatctagcaatgagatgaagtagttcttgtcggcacgggaaactgggtcaccctcattgataaaagcgaaaaacatggactttgacctctgggcagtaggagagagctgcaagggacgaagcgatatgggtggagcaccaaatgtgacacaatgaatgtgtttgaagcagccgcggagatgaatgagttcggattgcacggctggagactcggataggaggtgtagatatagcaagctggcgacggcaccgcccgcggagtggccagtgaagattagcgaataggacatgcgtgagggatcttcttcaagaagactacgtagccgggcagcgacgggggcaaccatttttcgggccacggataggaagcccgagtgacagcagttggatgggtcgtctagaaatcccatgggaggaactggtgctgcccggacgttcacggcccagtcgaggaaactctgcgtgccacgtatggcgaagacaatcgtgttcatgtcgtcgattgggagcgatttgaccaccatggctttggtgccgtgtagccaatcggagtccacgtatgaatgccgttcatggcctgaaggcttgtcgtaaacccggcgcgagtacttggctgctagctggaggaggggatatgttggaggatagctgaatgcgagatgagcaagttgggctaaatatgaccggagtgtggagggtcttacaatttcagcgttgttaaatgaggcggtaaccgcgaattggcatacagatacaccttcgagaagtaatccacagatcttgttggcttcttcgcttttcgctttgatcgatctttcttctcgtctgactgatgaggaattttacaagcagcaactattgtcacaaatgagtatcattcgataatacaatccgaaccataccacttacttagttcagtttctctcccacaaaacgaccccaggtcgatcgaggtgatgacttgatctaacaaccgcgatgtggcctccttgacgtttgcgccaccacccaaactctggcggaccaaatgttcgagatcaaggattgtcgcattggtcttctcgaacgtatgcgataccaagctggtcattgactggttcaaattcgtacacgatgtccattttgaaagtttcggtgggtgagcgttccaggggggactgcttgaggcaggtgctgggaaaggatagagtggctgaggttgtatacgagccatagacattgccatatttggattatatgccacggtagatgtatgagatgtgttaaatgtatgaaatgtgttgactgaatacgcccccgctggcgacccatacggaggatcgacatatttctgcggtacccctatttccggacgtggtggttttggcggtggtttaggagatgtcggtctctttgagcgactcgaacggccaaaggccatggcgtatatcccaactcagtgtgtgtgaaatgcgtggagtgcctggattcaatatgggctatcctatacgtattctcaagaaccccggtccttgtccctcgcacatcgtacagcgatgtaaagcgaaaaagaaaaaggcaatgcaggagtcatgcaggtccttcatgtcaagcacgcgtaagaagcagggcactcccatcacgcgggttctccgtcgacttctccgctggccgtcgataggctgaaatccgagtacgagcacagccccatccgggccatccagggcgtccacaacaaatacgattggccgcatgggaacaaagcttggcttggcttggattcagcttggattctagagcatatgattgtgtcgagttcttgacgtcatgatatttggagatgtcgaatactaatagcaaggctgaatgtaacaaatatgaaattagaagagacgcgatgggaacaatgacaggccaatgagatccgaaactgtaaaaccatctacgctgaaactgaggaaggacatcggtttagtcgtttgttagtgtttcattcgggcgcacattcccaagagccaatcccacatgatgtatcatgttgctgacctgtcaatggtttagtagttcatttgtcaacggctgggacaggaaccgcagctctgtccggcttctttattgaccgctcggatatggtgatcaacttttcaatcgactaattcggtcacgatatcgtgactatcaccagttcgcatgtctgtagcaagcttcgtatgtgaaggggtatgtgaagggtgatatgggcaagatagggaatgaacagatgggaaacgtgtctttgtatttccatgtcttacctcctggaggtagttgtatgtaaaaaagggtataaaaagccggtctagccataaaaacataaaatccaatccacataatgactcattcagtcatcatgcctcgtgaataataatgatgagtaaaaaaacgacacaagagaaaaggtatgtgagtcaagaaagggaatagaataaagagcatcagaaaggggagaaaaagaatcgaaaggagggccaaaaaaaaaaaaaaaaaaaaaaacggacagcaaggcacattggagaccggctctatggcacttctttgtcgcctcttttcaaaccaccgggtacattgatagcatcacgcacccaatccatagcagcaatctcatcaagggtcttgcgttttgtgttgcgcttgagaagaccttccacacagtcacgggccccttcgagtcctttgcccttttcggggtcccattcctcgtcctcgtcggcatatctataccaagcccattcacaccgtgcgatacgatgcggagtccgggcacgaagtttggcaggatctcctcgagtgccaggcagaacatcgaagggtaaccgattctccatgatggcatagagtagaacaccgagtgcccaggcgtcagtggagcggccgtcgtaagcctggcccatcagaatttcgggggctgcgtagtcttcgcttccacaccgggtctgcaggagcggactctctggtggttcagggatacgtcgagacaggccgagatcactgagggtgacgacggcgcggtcgtaggtacgccagtcttgcacatcatccataacatgagcgggcatggtaagcagaacgtctggaaacatggtcagtataaggtctgcagtatcctggcaaacaacgctgtctcactttctaacttgatgtctcggtgaacgatgtaatgagcatgcagataacgcacagcatcaaccaattcggcaaaaatgcgccggatcaaatccgcggacatacgagctcctgatgtggcaaactcgaacaaatctccaccaggacaatagtccaaaaccaacaaagcacgcttttcatcgctgccgaatgctttcagttggacaagggacggatggttgaccgacttcaagatttctacttcgcgcttgagtgatatttccagtcggccctcatccgcgcctccagcgggtccatgttcgatgattttgactgcgaccagcttctgattgttgacaaacccgtggaatgtgccagctccatcaccatccggcgacaaaggcatcccggggaaaggttccacacgtgctgccaaactgacctgactgaatgtgccctggcccaatgtccggactttctggtagatacgggcctgctctgtacggaccgaccggacggaatagatatcctgagacgcggacagaggggcggggtaacggataacgggttcattgtcactgtatccactgccactgctgcgaggcgggctgggaggacgaacggtcggcaatgcgatacctcggtagacagcgagatattgttcgcgatgaagtccattggacttcgaatctatgctcgacgacggggcgatcccaagcccagtattcccttgcactgcaatcggacggggaggaacagagacccggccgggtggtggtgcatagtcactcagactgcgattccgagaatgagaatgctttgaggacgagtcgcgacgatgccaattattcacgaatgactcttccccttggccatcaattccagtgtatggtttggcgcgcgaacggggcatgacggggggcccaagcatttgtgacgaatcgctcaggcgaagactggagccgttgcgcgacgctatcgacgaagaacgagataacgacggtaaatcacctttccgccacggggaagctcctccaattggcgatggcaatggagttatgtcacccatcgcattcaattgaggcgaggacatgatggatgccggggacaaggaaccactgtatgtaggtggtgcgatgagggcacgaaggctcggggtgcggtttggatagcttccggaaaaactggtcgaagcataaggatcggattctcgcgagctggacggtcgaatactgggtagatcggtgcgaatctgaagagacggcagtggcgaaacgtgattaagtatggaaggtgcgaaggaaggtgcgaggtcgtctaccgaaagagggctgtcaatctcctctttctttgtatgttcattgtcgcttgcatcttgaaacattgttgacatggtcgatagaccggacttgtgtatcattttggaaccgaaaaggtgttgggaggaaggatgacgcggccgcaaacggaaggccgggtgcgttgagttctatcctccgagggtgttttggggggtcggagtcacaaggtataaaacggccaaagataagagtcttggaaccccccaattaagcctccaagcctaaatggccttagcgtagacccgttaagggtcgcctctctactccgtaggtataacggaaggtcagaccgcatgcaagatggattattaagggggaaatgaaggaaagggggaaatgaaggacccaaagtaaatgcaattagaaaaaaagcgccacctgcgcaaggccgggcgatgatgcagcgaaaagaagaaaaaaaaaaaattcaagaaatcacctgggcaggatgaatggggatgctagtcagctgacgatcccaatatggttagttccccatgtgctccccgcagtgtttacttgagtttatactgcaatttcgatttggtaagatgggaataaggagatacggggataggagatggcatatattactttatcttcatatctattgcacactaggagccaattggatcagatccgatctcggtatatatctttaattctgcgttgatacctgtgagccccgaatctgattgctccgagttgtagttcccaaaggggaaggtggtgtgactatcatctgcacttttttgtgacctcggagctcagatatagattatgcctcatacatatcttatccgaagatcattctaccctcctacatattatgccgtacacttcattctctttccttcatacctcaaatatacctcaatattcaacccttgctcttggccctcgggaacgatagcttagcggctggaaccggaatcgcttacctgcatgtaggggccaaacacgtcctgtacgccactggtatagctaattttagcattcgtcgtggcttgcccccgaacccaaaatcgtgaaagaccttgctaaccgtatgacgacacctagtcccattgactgagtaccctttcaagttttcttcttccgacccggtaatatacgaaccaataaccaaatctccattcctgggagctgatgtggccccgatctaacccgttagaacccattctccggataaatcagccgcatgatgttgcttgggccatccatggatctttgcggctactgcgggagaggcgtcgaatggcaaggggtactatctacatgcaattaattggaggcgttatatggcgagatccaaggttggtgggggaagttttcgggtgttagggttatccactcttcttgccatcgtgaccaaggcccactactgcgggattgagagcaaaagacaagaccttccagttccgaacccgtcgatcatcgccgtccacggatgttccgtgctcaattgctggctgcgagtggctgggagaggatcggcacggacccgaccgcggtggggctttatatggtgaattctgtcagaccgaaaatgatgggatatcaactatcaagagcaaaggagtaaatattggctttggagtgtccttctcatttgttagattatctgcaaagtcattatcctttgcacacatcatgctcctcttgagtcggatgtctgcagatgcatcggactagaattctaccccacatgtatcgattgactaggctcgcgccgaagctataagctatcttgaagctcgctcgaattttcctatcagggctttgcacattttgcttcatctagaaaaacgtacaaatccttcatgctagtagtacacggttaggttgtgctcacgttgtgcaggagcatggcgctgtggttggacaggagcagcctctttcataacattggattgatatttattttagagacgcgataagatgaagacataacactattgaggcaagtcttgtattcaatccctcgggatgctgaacgccgaacgccgaacgtcaggaaattaaaaacaaagccccaaagcccaaacccggatgtgacagaatcaaaacaactgataccccccgggcaggggaacttgacagttccttttggcacacatttcccaattcgggacctctaccctctacaagccatttgactcagacctcattattatcttatggagcatggcatctcttccaaacttcgatgaccttcctcctgtcgaggggatgccgcaaggctgtgcatggggcatcttcgacaaagacgacgagaaagatgttctcggcaccctgaatctactcactccagaagtcgtcaaggatgctgtcacggaggtacgccaaggcgtgtctatttccttaaagtgaaatgcccttcataatctccagaatacgacctaataccactagttggcccatcgggagcatcaaaatcccagggttctttcgaaaaagcttctgtcacaatgtcatgaagttgaaagacgcagcatctggcagccactttggatttgacgacgaggtattgtgctgccaggttgttctctctcataccagagctaattaatcctaggtcgaatttaacacccaagccagtagtcaatgggatagtttctgtgagtccaagaactttagattcttgaattcaaaagagaactgactcgcaacccagctcacttcatgcacctcccaaccggcctcacctacaacggagcgaaaccaacaatcgatgcatttcagactcccgaatctgccccagatcttccaacactagaccgtaagcaaaaatccaaccaatttcaacatcaacactgaaaaaggctaatggaggacaccagactggcaccaacgcggctgtgtgacaggccgaggcgtactaatcgacttcaagagttacgcgcagacgcacgcgataaactacgaccaattctccggcttccgcatcgggaccacagagctagaagcagtggctacctggcaggggataaccttcaaagcaggagatatcctccttatccgattcggggtaacagagacgctgggtcagatgaccggtgccgagcagggcgctgcgatgagcagcggcaagatgtgtgggctggaggggagtaaggaaatggcgcgttggctttgggatcggcatttcgctgctgttgctagtgataacacggcggttgaggctatgccgcctatcatcgatggtgttgagcagcctacccatgagcttgtgttgcatcagtggtgtcttagtttgctgggtattccgctcggtgagctttgggatctgaaagcgttggctcatgcctgtagggctagtagacagtattctttcttgcttacttcgtccccgctgaatttccctggtgctgtcgccagtcctcctaacgcactggccatactgtgaagaggacatgttttactatgtaccaacggtctcggtggatcacagtgattagacacaaatgaaattcccggtacttttatttgtggagatctaaatcgaagttctgtagccgttcatctggggaaatggttcgagtacccactttgggctccacatggcttagcctcttgttctgtgggccccgagtatttatagatgtaacatgccgaggtcaatatattggagcatggacggttaaaatcttaagaagagccagccctagtgtaatggactatagcacgttgggatatgtatgtttatatacacattcaaacaagcatgaagtcaaaatcagcttctcttgcaatatcctgccactgtatatcaacgtgcggtccagccactgcccgccgattccacagagcttgaacgatttcacataatatattgatactctggatgccgtgccgactcttccggtgaaagaatgccaacattcgatcttgcagatcaggccggtcgcagtcagccgcaaccacaaaacttgcccagttataggaacagccacccttgtcgcgcgtgagcgcatcgacagattcaagctcgtgtatgcctttctcaatcagatcctgtacgtcgcacaatggtgcgccacgcaaactgcggcggaagtatacaatcgtcgcatagtagaatgagttcaaagcgtgttggacaatgaccgaaccgggggcgtctgggttggacaaggacgggaagttcaagtagagctggagttggagccggtcgagttcttcggtggaaagctgtgtctgggactcaacaagtgtggtgatttgagcgaggcattggaccagtggtattgtgactccatgcgattgttctaggtagtgatgtaaatgggaggggccattgaggagcgacatgagctggtcaggtataggaagactgcatagtgaggaaagggacaagtagcttttaaccaatctagcagcagtcggagtacggatccaatcgccatggacctcgttctccaggaggccaaggcatccagaaacgtgtgctctccatcggctgcggcgaccagacatagcttcagcggagatgcaggtaagcacagcggctaaagtgggctcatctaggcagctagcctgttgtaggcttcctcgcaaatgacccagagctagctggtcatggtggacggcgatggaatggtaccgcgaatcatgccggaggtgagaaagactaaaagcagaggaggcacagatagcgtggaagattgagagatggatgttcgattctgctggggaggcatcaaggcctttcaaagccagaggcaagaacactgcccggcagggattgtccggggtgtcaattaagagcatgtttccgctgagaaaaacaacccagtgatggactagctctgtctctggtcttgggagaaccaatggactcaaggaatcccagggggatatcacagtccgattgttgtagatatttgatattggtctgccgtagtcgctcggttctgacggcatatttctggggcttttgtggtgaacataggcgacttcattgatagacatatcaccgaccagatcattaggccttgatgataccgtgcataagtccttgtgggattcaaacataaacggcgcggtagtagatgatgagccggcccacgtgggcttcggtgaagccaactcgctacctctgtcgccatctgctaagtcgaccaagtccgagatatgctgtgaaacctccgtttcttggtctaaaagtgaaacttccaagttaggtagatcaacacaggttgaatcttgagtctctaggcttgacaaagagaacaccgagaacggtcctcgttgttgggcacagccatgccctgaacatccatctaactcaaccagtagttccgtaacagcggcagatgacaacccttggtccgcatctgataatggggctcgcaattggcgccgatgagagcgactcccgggggcttgagaccatcctaggcgcaaaccataccctttgcacacccaaccactccgctggcagcgcccacagtgagggtattcttcgtcgcacttcactcggcggtctcgacaagtccagcatccagtgaaagtcttggtgcgtggttttgggactcttgcattatttgacgatatatccggcattgccaaggatctgggaagggtgaaagctctggcccgggcaacccatttgcccgcacgtcggcaatcgccggtccctgatccacgccgcggatgtttgccaccgccgggtggtattgcgccagcaaataaactaggtttaggagtatttcgttggctccgaaggttagtatttctacaaatgagttatatattgagctatagcctgcttttttgcggcatcgctctccaaggttaccgaatattctttcatctcgcagctaaaatgtgagtagaaatgtgaactccactcattagaaatcaggaagtgtgagaatttgtctattggaagtcactagcagcattagaatacgtaactgacgacacttgcaagcgtcatagccaatgaatcgcaggtatgcaagagacttttctatgtacacagaagaaatacaaagtacaaacccagttgcacatcccattcccaacccacgcataaatgcgaaacatgaagctcgaagcgccggagtgaggagacccgcaggggaaataaaaaaaaaatagttgtaatacatcgcaggcggaaagacaaggcgaggcggctaatagtcaaccgccaatgtcgtttaagggtagcgtggagggtatggagtatcggataaccgagaagcggagtagggtaaaactggccaagctagcaatctagaagaaggcccttcgggtcacctgtaggatcgaggttagcaaaagtcagacagcatatcacagcaatatacatacagcccaggcaccagcaatggtagccacaatgccgccagagatcatcattggcttaagtccacgcgtgctcttgaagaccatgccgctcaatgcgccggccacgatgctgttagtcgcgtcatgcttgcctcgcacatatccgaggctggagttgaatccgttgtaaaccatagctacaacaccagccgagtttccgaggaacggaccgcgacgggtaacggagttgagtacaccgttgagtcgaattttgggtgctgccgtgggtggtgtctttttcaatccttctacaagtccccacgcgcctccagtagcgagtgcaacgagataggtagtaccggcaccataacaaaggtcatctgaccatccacgggatggcaacactgatcgggagccggggagttcgtcaagggcagtgtcatcgagggagaggtagtcgagggtatcctggttcaaaccagccagaggatggaggcgagagggatcgggaatagcgacctcggagaggaaggatgtggcatcttgcgcggttgaagggtcgaaggcctcgggcccggtttgcttgcggccgctgagggagtcccagatggacattgtgaaaagaagtatagaaaaataaaggatagaagataaaattacaagaacctaaggagaaccttggaaggcagggacggatgactggaaaagaagtgatgaccctgtgctcgcagctccactggcatcggaacagcaaaaacttcggtcccgtgacttccggcgatctacggagaagaatttggccgagggatagacgcttaacccgattcggaatcccacatttatcacttggcggcctgaggcatcgcggggagcataaatctctaaaaattaaacgtcggggagatctttttcgcgtaaaccgttatccaagataccgaggcttgtgtgattggaactctgactgttggtgattcacgtcaggtgcaatgtgtcgtatcaaaatggacgaccttgcgcagattgtgcagttgttctcggaaaaaaccctccgagatatcgccaaaggcccattggtgaaattcacactgacatgccaagacaccgagtaagtgaagtatatgttcaatccataataactaatttgttctaatatttccacaagaaaggtgaaccgggtatggcggtctttggttctgacgctatcgacagcatctatctcgcaacctcattcagcagaggcatgcaatgctgcctctgcttttattgatgctgccaccaagtcacaatgtgacgcgactcaacggttgattttctcacaagaagcatggctgtcaatattcgatatttgtttgactcgatatgaagatgcaaagccaaagcctgttaagaaactcctcgcctcggttattgctatcctagtcaaaaatcaccaaggaacaacgagagcagcccttcaaaccgcagtcattgatgccataattcctagcattgtgcttggggagcctcaatcacgcctgaaggggtgtctggtatttttggagacattcatcagaagggatgccctgttacccagcgagtttatcccattgactcgccagtggctgttaaagaatacagataaatgggcaaatctcttcgccaacgatcatgaaactctctccctaggcgaagcgggccccgcttttgacattgcatctggcagcctgcccgatgaactggcaacgaggatctttgttctgggactcttgatccaaaccaacaataggaccatggccgtatcagctggtaacttactggcaattttgatccagaagatgaagcctgaaacctcaccggaaaagctgtcagcgatgtgggtactcccagtgagacgcatggtcttacaaaacatagaaaccttggaagatctgtcaaataggctcctgcagcctttgtttaccatcgaccccaatggcttcaggatcttccttgacacacttccagtcaagagccttctcaaaggtgatatgactgatgcgcctgaggcagagtatatggttcttttcgctgctctgcagatcggcaagaaaaccaacctggttcatgaagattgtgagtggcattgttgacctattattattggtgactggctaatatgcgcagatatttttaacgttggcaaaatgaaactcgacgaaaatgaggtgttagtcctgaagagcgacgtgatcggcaactttctcctgcaccgcgaggccaatatccgtatagcagctctctcgctgttgatcacggcattttccacagtaaagccatttactgttggggcaacgaacgttatccttcgaggactaccctcgatgcatgctgaatccgacgcatatactcgcggagaaattctgagtctgacacgaaaattctttgttcgtctaagaggtggcattgttaaagatgaagacgttgtttcacagacagacaaaacagccaacaagccaggtcaaggccaggtcagaaatgaaactgaaaccatagagttcctaaaggcatacctaaagctattgggtaatgatttgcgtcttgcggcctcatattcgcgccacataacggcgctcaaagctctgaagcttctgctggactccggtcttgatccacgtttagaggtcaagcttcaaaaatcagagatggaaaatctttggaaagttcatatcgaagtgtttgatgcccacctacttcggttgttgattgatctcctgctagatccatttgaagaagttcgacaaacttcgctttcgatcttgattctgtgccctcgagagattctgctcaacggcttgcacaacaagacagaccaacagtccactgcgggcatgcggttgacagatgcaattacccgagcggaaagccttgcaagtaacacgagccgagctgatcacgctgatactgttgctcgtctctatcatatcgtcttttgcgcagccctgccagccaactccggtcaaccggtttctgattggtggacaactaaggcatcagtagttgacacaattttaagaaagcttgaggaacgtctacttgattcaaagacccttttcagctcaactatgcgcgaggcaccacttcatggatatacgtctggtcttaggtatgttgtcccggtccgtatatgtgataaaattctaattgcaattccaggtatattgttcttatgccaagcttccactctctgatatctgatgactcgggatccgctgcttggcggtctgtccatgaccgtattgttgcaatttgcgataagatctggattgaggcgaagcctttgctgtgtatcgattcacccgaaggtcactcggacgagcctaccgaggacctgaatgtgggacccaaggacgccctttcttattcctggagatctcttcgcgaagcaaggtaagttcaaatcttttttgactatgcatgatcgctgactggagcagcctcttgcttcatgccaccatggtaaacatcagttacggaccaagcggcaacgatggactcaatatggcggatttcgcaaacattggaggcgtgagcttcacacagttggctgaacttcgccatagaggtgcattttccaacgtttcacagacatttgcgacatgctgtcaacgatgcagctcctcgaaggatccggcaatccgagaacttccgagaacctggtaccaggaagctaagtcgactatctttggctcggcatctgaactcacccgtcggtctgctggcttgcctgcactggtgactggaatcgttggttccgatcccgggactcccttcttcaatgaggctattaacgagctccacgagatctcatcccttcccgttgagtacgacaaagagagacagtacttagaactgccccaggttcatgcaatgaattgcctgaaagatatcttcaccaacgcgaagcttggctcccataccgagccattcattatgaaagcactgacgctgtccgccgaacgccttgggtctccaatctgggcccttcgcaattcgggactgatgctcttccgtgccctactcacaaaaatgtgccgggccattcccggcgctgggcctggttttggaggaaactcgggctcagagccaggatcccggataacattccccaagtaccctggtctacttgaactgctctctggccttctcacaacgacgcagggcgaagcagcagaggggactgatattattaccgagcgggtgttccctgcgctagaactcgttggggacaaagtccctagcttgaatgatcctattgatgagatgctacgcgggttggttctggagcacctgaacagcccagtttggggtgttagagagcatgcagcccgtgtatatgcgtcgttgttaacccgacaaaatatcccggaagatttatgcactcttgtcaagagtccctcaaaaatcaccgagaattatgttcacggtgttgctttgtgtgtgcgatatgcccttcgtcgatactccttcaccaccgatgatttctggaaatgtgagtccgctgaacaattcctgataagactgtagttaatcatttgacagccaaccttgatgtacttttcacgaccttgcgcactgtattagaatatctgttccgtgttggaaaatcgccaactgtggcaggcgagcttgttgaaattctcaatggcacgttggagcgggcgatacaagcccataacgaaagtgaggatattcacctgagtaaagaaaatatacgtgctaacagatctatagaccaagttatctcttttatcaacgagatattccaggttcacgaactcgatgagattttgagatttgtttttgacgcttctcagacaggatggaacatctcaagcactagccgagcatctgccttacttagaagagcgcttgcttggtgcacaacattgaaaatgcttacttcccagcagtgggaacatctcccagcattcatcattggagtatcgcaattcgatgcagatgtcgctcgttggatattagagcagctccacgaattagttggcgaagaagacaggtacagacagccattggctgacttgtattcgtctgtcattttgggaggtagtcgacctgatgtgaaaacaatggccgcatccaatttggcttctatcgaggagaacttgttatcatcactgtccgactttgtgccaagcatcggtatcccatgggatgctattgcaatgagcttccgccctgaaacagatatcacaagatggaaccgagaggcaacagacgccgagctccgacttcgaggctgtatactggccacccggctatctgttgatcaagcagctttgtcctcatctgaaggcgatatccacagctggactatcaagcttcgctctgccttgagcgaggagacagtgagttttatcgagaaatttggcatacaatcgagtcactgatctaatctttttcgtttcctaggaattcacaacccgttttgctgcagccatatccgttggcagcttttcacgggctcttagataccccggttcccagccacgtgtggattcggtgctactagatgtctatctggtcttgtatgacatgcttaatgatgacgatgacgaaattcgcgatgtggctgcgtcaagtgcctcttggattctgtcacactcgtcagtttcacctgacgccgacgtggccctggcgcctcttaatgcaagtgccctgcttgccgacttcattatcgataactattcagattccgcacgcctcgggcagcgggttcttcgatatttgactggccaagagccaaggatcagtggatctgatgaacgcaatcacccagttgccgtgtcagaccagatcacagagtatcgccaagagagcaccgtcctcttcgtggaggagaaacagaatctgtttatcgatgatgtgcgtgaggttgagatttggtcgcgagctctgttgcggttgactccctcggcatacgctaagctttcgttggatgaaatttctgcctggacctttgagggattaaattatctctgctctcttgttggtgacgaaaaagagccagatggacttcttggttgggtctcgaagcccgagatcttcaccttaggtctccgagttattatcatctcgtctgctctagcctcacaagtcttcacagcaccagagagtctgcaagtgcagccggctgccttccggggatcactcaaatccctcttggacgcaggcaagttgtcatcagtccatggggattggttgtcaaggatccagactgcattggaaatgtgagatgtaatgtgcattaaaagtgaaaccaggataactagttacatatacgttggatagaagatcaaaaaatatctcgtttgccatgtttgcgagtctgttttctctgctccttcctcatttcctcttaccttcttcacttgatgtcgatatcctatttaagacctccaatcaatcctcccactctccaccctcttcattctcctctttttgtttcattctatgcccattcatccttatctgacgtacaccacacaaatccattcccagcactgcagctgcacgcactccaaacccgtcacttcgagtcactctttcgctactgagttgcaccatgaaggacaatattctggtcgcagtttttctggcgatagcgttggtcaccccggccttcgcgtggttgttctacgtttggtatcggtcacccttggcccaactgcaccaagaaggccgaatcatcaacagaaggaaccaagatcgcgcccaggccaactatgagcccgcgaacggagaccaaaatgccatatttggaccctactttacccctcgcggatgggttcgaccaaaggcccgaagactatcccatgtcccgccacagtacgttaacccacggcagccgagcggtaacccgaatcctgaccaacctttccaaggacaaacccaagcgagcacgcatagtcctcagatggcgaaccaccagccgaacccgttatctaaacggcagcaaagaaagcaacgagcgttacaaaacaaacaaaggcagcaacaggaaagacagcagcggcaaggccaagatgagcaacagaacaagcagaaccaacaaagccagccgaaacagaaatacaagaaccaaggccagaaccaccagaagcctcacagtgctcattcccccaatgcccaggagggccacgacgagcagaatcatgaatggggagacacagaagcacaaaatgaccaaaccaacaaccatggtggtggggatggatggggagatgatgacggcacgcgggacaatcagcacaatactgggcagaacgaggacaacaacgattggggtaacgatatcaacaatgaccaaggagatctggtaaataatggatcacattctccacgacgagacaatcacaatagcccaagggaaaagagccctcagtgggataacgaacattacgatgaccacagacacaacaatggaacacgagaaagcaatgaagagcaacaccatcacaatggatggtccaacgaccgccctgcttctccacatcaagcgtcaagaaatgaagcggatccgcccggtggttggggtcaggatgacaatggtgcacagcagaacagccatccacgaagcaactattccaacgaagaccgtaaccgccacggtgaatggggaaatgatgatgcaaaaatttacaagaaaggcaaagacaactaccgtgcatcttcggaacgaaggtcaagagaccagtcaagccccaaccgtgactggggacaaaatgaccatgaaaaatggggtaactccaggggacatgaagaagaataccatggcggtggcagctcagcccggagccaaggtcacaatgtagacagagacaagaagaagaaaaaagaacgctgggtgattgaattggaggagaatgagaagaggcagcgtcgtagtcaaaaccgcgaacgctcggatgcagcatgggaaaatcgaagccaggcttccggctggaaagagaaacaggaatggtgaattcaagttgattatttcgtgtggattggggtggggagttttccagatttctggatttgcgttcatgatagtcgatatttcttttctacaacctgtgtcatgccaaaaatctatatctcatagctaaatctcttaagacttctatacatttgattctcaaacacattgctcgtatatccatagctatactaatgaaactgaatcgaatgaggatgggatgttcactacattacaggccaagacttggggctacccaagtcctaacaaagaacctcgagttcttcatattccgcaccagccaatcctctcttgccctaagattaggaattcatagtgatagggttttaggtctatcaatcgagtaggagttgaagctggaggagctgtgattgatttctgagcgatatcctacgctggaaaaagcccggcttatagaccaagaaagaccaaaagagctagctatatatgttgttctccggtagaggccgcaaacgcgagcgacctcattgttcacctagatcgagagccccattagactagatgcgttagaaaacccagttcttgcataaattagagtcttggcgttcacaaacctgcaaaatcagcagaattgtgcacacaattagcgtgtttgtatagtttataaccgttttactgcaacgttggagcttattttcttcggagaatgtattaagattgtatccgctttggcagaaatatatgtattttggtaaggtaagtcacaaactgcaaacataaacgatcaaatataccgagagcaaaaagttgtatatcccaggacctgacgccacagaatgcagacaaggaacttttaaacagaacgggtgatgtgtataagcaatataatcgcgagaggtgaataaaaacaaatctatcagcgcgaaacagacgacgaggcgactgtgtcaggtatgttggcgagaaagaaacacgaaaatgtgcagaattcgatcccattctcgaaagaaaggggatgcggtggggtttgggcgagactatcccggaggtctataggtgtcgagggtagataagggaaattaatgacgatcaggcttgagcgataggccatccgtcgacatatttgagaggattaaatcccaggaaggcgtcctatgattgtatgtgttagatcaaatcttgatgacgtttgtgcaaggggtaacagaggaggatcgacaggggtgcatgaaccacgacaatcgtggcccacaagtctgccaatattcaagtgtgagctcacctggaatgcaatgccaacggtcgtgttcactgcgatgaggtcagtatggagttcaaaaattgtatttgagtctaatttgagtctaggggtaaacgaacagtagtggtagtagagcacatcggtatcgccgtcacggatcacagcttgcccgcctggggcataggtctctctgttcgagccgtagacaagttcgccgccgcccttgacgagatctgtaccgttcttgtctgtgaatggcccacggggactttgagagcgtccaacgcggatggaatatctgaagtacgtgagtatagagcaacaagtcactagatagcgaagacttactcttgaccagcggccggtaggttgtcttgcttcagattacagcagaaaccatggctaaaccagagatagtaccatccatcgttgtaggagataaaagcaccctcaataggatggggaccggttgggtcaccacagatgttattggccatgcgattcggcggggcgagggattctggttcccacgccagctgacggtcatcgggttcagtagtgctcgctggagagagaaggtccttgctcagcggaatttggaaaattccattccagtagcttccatatgtcaaataagcatgtccatcgggagtgaccaatgtgctagggtcaatggcattggacttagtgtacggagaaatttccgatccattgcccgtgccagtctgaatgacaatgccgtgatcataccagttgcccgggccaggagagttagaggtagccacgccaacagcactgtcgcggcaaccagccttgctaacactgtaatagcaatagtatgtgtcgtcgacaacgataacggtcggggcccagggtgcggcacgatcaccctttgggattacactcttggcatccagcacactgccaacgcgcttccacgggccagccaggctaggcgcagtgtcgatgaggatgtgttcgccaacatgataaagataatactcatcgcccacacggacaatagtaggatcatgtgtatgttgctgtgtctgacgaggagggggaaagcggcttatagcctggtcacttccgagatcttgtgacttctggtcatgctcaaagttctggtctcttcgattgatacccaaaccaagaccaacggagaagaaacatactaaggcgagaaagagaagcatcttaatccagcgtcgagggaattgcttccaaaaagactgatgtcgaaatccatcgcgatggccagacggcgacatcgaccgtgataagtgaccggccctgacgatcatcttgatggaaccaggtacacatcgttttcagtcgacgcacggcgttgccaccctagtagggtggagttgatgatgcagggcagcagggcagaggggtgaaggagctgcgacacggtccactggttactcaatagaggcccacaattggacatgcctgcagggtttcggaatgccgaggtaataagttgttctgtatattgcaggagatacagatgggttattcgccttggcgtgatggaagcggaagggatgggaaggcctcgtggcacaaaagatggatcactgttagaccaactacatatcaggcgattgaactccgagatagtcgtacaccgtaactttgtacataaattagtgaagtcggcaagcaagggaggtacctgacttttgaaatcaatcggttgcagtgtcgatcttccagatgtccttttcaagtcacgggaagtgattggtcaacatgttcggaatgcgccttttgccttttaaacatatcgctcttctccaaggaggatgaaaacggatataaatccatctaggagcaagcccttttctcgtttgacacctttctaacaatatcatcctgtagggttgcaggtacgagggcacgggtaagacagagccttgtccttgtccgtctagggctactactttctatacagaatagcctagactcaagagaatcggagttaaaagaattggatataccaaatttgttccagcgaggtgagtagtgacaagtagtaaaaagtagtaaaaaagtaaaagatatccgccgaacgccagcgccgagctccatcagactaaagatggagtatagtcttctatcgagccacgatcttgtccacctcatctctagcttcggtccatgtctccaggttcttgcgagcccagtccaagtgacaacgagcatatgcgacctagaaacccaagtttagtcttagttttcaggtatgttagggggccaatcataccatgtaccgtcgcaggtcagcttctttgtccttctggaagcgcttgagatcattcagcacacccgcgctcgcatccttgacgtccttttcggacacttctaacgcttgctccaactaaaaatcgagattagctttgaaaccatctgaaatttttactccgtggcccacatacctgaatcaaactttctttcgtctttccaatctggtcccgacgtgttcgttcgggatctacatcagcaaatccgtggatggcatggctgatgcgaccgaaaattttattcgccacaaatgtcccgctggatgtcttgcgatgaccgtgtactgacgggtccgatctcttgagtcctccaatctgcgatccaggcagagagcttatagaatcggtgtgagtagattggaggccagagtcggctgacattatggggccgctgcctccttcgctggcggatgaagttgacagagaacgaggcttcgtcgttccagaatgagggttggtgcgattgagatactgctcgatacgcttggcttctagttcactgcgctcaagggagtctagtaaagtttttttcttcgacaactcatcgcgagtcatttcttgttgtacccgcttgagcactctgtatcgtagaactccgcgaaccacactagcaaattgagcactctcccgcataggttccgcaaaacttgcgctcagagccgaggatagctcttcggtttcaatatacgaagtatctgcagcctggccgatgcgctcaatggcggcagctactgttggtgactgttcagaaagagagaatccgttgtaacgcgctcccaactccatgaggtcggctgagagtccagacaaatgcgagagagttcgtcgattaactttctcaatgttgccctgcaaaagtagttctagctcacgtgtagaagcttcaaaattaataaagtaagggtccagttcttgctcgctaagctttcgagactcaggagggaaccgcccaagcatctcaggtcccgggaatgagggctgctcttgctcattcggtgacgtaggcgatgctggatttgcgctcgctgtagtaatgccaccgctggtcttgagctttgcggatgcagagggaaccgggagccagccatgggctggtgtgggatttgcggggtcaagaggtggcgctttgaggttattctttgggacagatgatgcaggatgggagctcaaaacctcactctgggcaaaagttagctaataaactcgtcgccaggagcctcccggtcaaacctacccagctaacgttgggatctaggaatctccaccacactccatcctcacggatctccttcatacaccgacagcggttgagaaacacaccgagcatgcgctttcggagatctataatggccatatcatctttagccctggtaggtttagctgcgtagtccgccatgctgtgcttctcgggaattggcggaacaaccaaggtgggatgcaaattgacaagcgtttgtcgcaatgatgcaaactcggaatatcgacggcgcacttccaggtcctatcaacacttagcattgtacagttccccgccaggcaccattatcataccgcagtccgaatcgtgtaaacaataaagcctccgcctccctcatggtttttcccggcatctgtgatcaagattggcatatcggggttttcataaaggatctgttcaatgcggctgtcatagacgctcttccgggggtattgttcactggcggcaccatactcggcctcatcttcgggatcgctgagatcgtcggtatgggtgatgtaatcgggaggctcgccgttggagtcgcgactagacggaggggatgagtcgtgttcgtagagagctggctgctgtgagatactgatccaaaggcagaagcgttagggtgcgaaccgagcggagacttacgaggagagagtgcggctgaatgtaaagagtcagataggccggactgatgttggtcaaaggccccgtagggattgttatcttcgtcgttccacattatgagggtatggacgctggataagaccaactagcaccgcaaactgagttggagaagctgtgcctgggagatctgcgggggggaagtcgtggtgtggctggtgcagggcggtgttcgcgattacgtcatgaaggaggcttgaactccaatcttcatcgatggaatatgggcaagagactgtaaaatgggacagccgatgaaaacttgaaagtgtttggtagatgtcttgtgtcctaggatctaatggttgcgatgattccagcttgaacccccgctggtccaaaagcggtcgatgtatatatatccatggatcggtaggctctaaagcaggacatgaaatattaccgagccagtcaagcttaaccaatatatcccccaaacaagattggaagggagttactctacacaaaaaggacttcgaaattaacatcaggtcagagcaatatgctaataaaaaggtgatttatgctgaagggtgcatgtatggcaacaggctcgaagtaaagaggtaacaaatagttctagaaccgatttccatatctcaaaagcctcagatgttgtcccgccgtgtcctgaacaagcatcaaagtccataaagttttctcgtgcagtggaatgactcccatatctcatatctcaatgtttctgcgcccagtgtcttacgtctgatcggcaccctgaaagcctgcagcatcgtgtgcatttcgtcccacctgctctgtattgtgcatagttaataaagccgggttgattccagcaactgagctttgagtgcgttgtagaattgggagaggtggcagcgttggagactggggaggttgcggagcagagagcgagaaaatccagctattggccttgtcgacgaaggaagtagggttgtggccaaagtcaaatccttctctcaaaccatgatccccactggcggtgagtgaatgatttccataatggggttgcggctcctgggagctagccagagtaatgttgggttggttctggcggcgttgacgtaggttccgagtgaactcgttgtgagaagaggtactgtcggaagtgagagtgacagaaccaagttcgccaacctcgaggcggcgttcaactgggtggtccaaagtgtcactactaagccctagcgcaaagctgggagaagtggtacgggcgaggccgattccatcatgaggatttgcagcggatgagttgcggcgagctggaatatcgggaaactgcaagcttggaccgatgtcaagcacactaatctcactttcgctcaggactgaagcacgggttcgcatcgagtttgggacggtaggacccggctgtccattggaactcgagctttgagtcggggcgggggtcgcgtacggaggcatctcatttcctagaatagaatttggtctctgggacttcaataacttgagacgcaagacctcgagcctcagaatatcgagttggtcgccggcactttggtgatccaagtgtctatcagcgttgtcggcgttgatattttcaatcagcgacctggaactggcagcactgaagttgatagcctctggacataagatagatacgttgggattgagctcgaatggctcatggctggagaatccctgaggcttcggagaaggcgcattgcgtttcatttcgggatgagtgcgtggatttacggaggttgggtgattgaagtgagagaagcgtggcaatttggagaccatttgcgtggaggtgattattagcacgcaccttgccctaatacggaaggagggactgtagggctggcactttccttacaaagagccttggctacatgacttcctattctgtacagatctatgtacacatcatgcacatcatctgctcataccgtatgtctgtatgcattgcttccgacatggagtccataaacggagatgtctaaatccctgagtgactttaaatgccatatattccgataggtaaatcaatgcaggacattttaaagcacaaatatattttgcagttgccataaatattagtactatgagtgcttgccaatctcactagctgcacaagccctcttgtacagcctatggaatttcactccacggaatcaaacactttctgttgactggaaaccgctagcacatatataatgcatatagctataagaccagagtcttgtctagtacagcatatatgctgataatgcaggaagaattggacaaattatatataagagtctagcactgaaacactgcccgtgaagcaagttataccaatcccgaaacaaatatgtctgcatttatgatccacttaagcctcttggaactgtcgtttgatagtaaactgatcgtgttctaggtagataacaatgggagaacagagaacaaagaacaaaaccatcaaacttcacagaccgagcgaggtcaccttatatggacacacattgctagcaccccttgtcgacaagactaagtgtagagtcaaagtgtggacaaatttgattccgtccgacctacgataaaggaagcaaggccatagtaggcctacgccttgtatgtaacgattgtatgtagcgatgaatctgatactcaagtgatgaacttcatctacaatttcgctatatctttacgttgacctgaatttggcctcactcttactttgctttgagaagatgattgaaaaaactaaaacaagaaacatgatttttattttgtatgggccacctgcccatcccccttctatgtagagaaacatcccccccccccccccccccccccccccccccctcttttttnnnnnnnnnnnnnnnnnnnnnnnnnnnnnnnnnnnnnnnnnnnnnnnnnnnnnnnnnnnnnnnnnnnnnnnnnnnnnnnnnnnnnnnnnnnnnnnnnnnnnnnnnnnnnnnnnnnnnnnnnnnnnnnnnnnnnnnnnnnnnnnnnnnnnnnnnnnnnnnnnnnnnnnnnnnnnnnnnnnnnnnnnnnnnnnnnnnnnnnnnnnnnnnnnnnnnnnnnctcccccctccgcccctcgtccccttttgtttttttttttgtttttcttttcttttttcatatcattcatgggtccaaggacatgatgtcctcggaccccacacgcagttccatgactgggagatcatcggaggaatcctccccctcacccccagaagtgagaccaaactgaaactgagggtcgatgcccatgccatcaccccatgggcatcgaccctcaaagacgccatcctcggtggcagaattaccaccggcaatctgtgagatgtcgtgagcggcgtcgaacgaccaagagggttccgtgagcttgctgagggagtcgacctgcgatcctccgttctcgtgctcaaagccgtttttcttaccttcgctacccccgtcctccgagcccgaagtactctcctcgacagaagagtacagatcattgccgagggaatcctgcccccggctcacacggggtgccactcctgccctggccaaggcagacgacaccttgcggggtgcgctgccaatggcacgaccgccgtcctccgaaggtgattgggacccaccagggctgcgggaaccggaggaactgccagacacgctccccgcgcggttccggtagccttcgactaggtcccgcagctcctggttaccaaatgcacggtcggagcgacggcggtagaacaggagataggcacccgatgtgatgatcgactgcatgttggtgacagtagtcgcagaggtatctgaaatgaatgtcagtaagatatctcccaattagcatatggagggggcatcgaaccgttgcaatagacccaggcaccggaaacaaagtccttgatgtaggcagtgtagtggccactacccattccacccatgtggttgtcgacagcaatcaaatcgtacaccgcactttttccattcgcggggccttccacgcggctgctcaagtctagtccctcgaaggggaagtcgataagagtgctgatcttgtgtccgtgcctgccacggaattggctaaatcgcttgagctggatgaccataatatccgggattctccacagctcaaacttcttggtggccgaaacgtgagttttgcactgaggacaaaaccagctatctgcgcgagaaagaatttcctccttgctgaactcgtccaggcattggtcgagagagacatttgtttgcttcggtttcttctggcttaccgccatggtatgatcatagacattcttgatgctcatgtaggtagggcagccacggagctcctcgggatcacgtagcttgccgccgaaaagggcatcaaatgcatcaggagtccagtcaaggagaatggcatcgccttggtgaaggaggggtagtgctgagtttggtgtgacatctgattcatctgtatcaacgtcatcttcggcattgtcatctgcggagcttttagataaagcatcggatccctggcaaatattagcgggttgattatgaatggacaagatggaataaacaaccttagtagaagtgggaggagatgggatgcgagaggaaatagaagggtattttttcagggtggagatgttgcgtccatcaggcaaagtggcatttgtgctcatgactgtcgcatcgaaaagtgacaacaaactggcaggaatcttgccagcaagaggatgccgaggggattcgacagattcagagtcagaatccgactcatcggagctctctgcaggcttaggcgcttgctcagcttgcatagaaatgtcgacgatgctgtcttcgccgtcaacagaagaagttttgattcgggaatctgctgatcgtgcatcatcctcgtttgtgaccacggtgtcagagtcatcagctgcattgtcatcggtcgttttttcttcgacggccagaatgtcgtgtgtagtcagattattggcttgggtcaagagcttgcggtaaattgcctcgaggttctgagtttcgtcactagaaagacgtatgaaggatgggattccgaaaagttcacgagtgggctctctgtccttgcgcggaacaagtttgcggtggaagacgggtacaaggattgcatcaccatcggaggtagtgtcagaagagttggtagatgctggaagaggaccaagatcaaagaacacaacggtgtcttcttgggaaatgcgtagactgccgaaagtatagtcatcgtcgcaaagaatttgccagaaggaattgtgcaatgtttctgctgcaaagatttgttctgcattaactcccaccttttgaccgacaaagttcttccagtccttcaaagtatcattttcatccaggcggactttcagagacaccggtgggccatcaagagggtaaaagttgattgttcgattgatcagtgttggacccgttgggatgggcacagtgaccattgtgaaaggatccatgatgatgctggtcttttcacaattgtggcagatcaatgttgacttgtacattccagcgaacagatcggtgataacggaggcgttacgggcctcgtagagctcccaacacttctttccgaaatcctcaagagccttgcgatcatgaatcatctcatcagtggaatcaggaatgacagtggatggcttgctgccaatgatccggcttagatcttccgacagtgcatcaaggagaaacatcacaaattcctgactatcatgttgatcatagccagcaaattcttcacgttgccgaccagcggcagcccggaacctagaggggttgacacatctcggctgagggtccgatttgtagagctcctgaagcaggttggcccattgcttggcaatggcgccgccgcatccaaggacgttgttgggattcagctctggtttgtacaatccacctggagattaagattagcatcacgttcgcagtatccaacagtaaaatgagtgtacttactaagaaagtaataagacaactcctcaatgcttcgcacacattgcaacgcagagttcatgtaacaagtattgccaaggttttgcaatcccacgatgagctgtcgacccttccgacctcgagagatgagccccctgattggatcgggagcaagtgtaggggtagatctgccactggcttgtgtgctcttcggtgtggcttttgcaacagctgctttgctagcagtatctttcttcggctgatctacagggatacctagactcttgagagttttggcagaggcttcagacacccattctccacctttggaaccgccgacctgttcctcaagaacaacacaattcgccgcggcgagaccagccatgtccaaggtcatgcgaccgttgtagttggcattgtgggtttgatccttgacaccatcaagcaacactcggtggcttccctctggaagttcgagaaaagcgttcaaatcgaaaagaagcttgtcgttggggtcagagatcagagccaatggaggagctggcgattggctgcgggagacagctggggttgccaacgctgaggcagtggtgctttgggggagctggaggattttccaaacccgaaccttggtggacatatcgacaccagtctgttctttggcatccctcaaccatttttggtaattcgtctggcgacttgccaggatcttcacagatggcttgacggtttgtctcaagatggtcggtgtagtacccacagctgggttggacagtttgaaaatggtgagaattggaggataagtctcatattcgatattttcagtatcaccgggttggttggtgttgtgagcatagcgaattatgatgggtgactggtcggcgaggccgtaccatttctggatcaagtcccaaccatgttgcggaatgattgcgaaatccagagcgtcgtgcaaaccggggcgcataggtacgaaaacttcaccagtttcgtctttgaaggtgggagtggccgggtcggtgtcgagcattatgttcatattgtcgacgggaccgacatcctccaatggtcctttgtccgtgtgatcagcatgagccgtagtacgtgcaagcaccttctttagccacgccattgacacaacaaagcccttttgtccatccttcagcggcgctgtcatcaacgcattcacctcagccacctggtcgtcgatcgtaggaatatcgtctgatttgggcgatgccggtctggaccgctcgccggccgaggatgccggcccggtcttctcattgcttgaggtggtaggataggggggttcatcgtttgtgccgtcgcatgtgcggggaataatgtatgtgcgggtgggattgaagccagtgctcacgcctccttcggggtcagagtcggtgatttcggacgccgggcgcttttcgccaggagaaggggatcgtccatgagttggaggtgtaccctctcgagtatcggagggcatgtcggaatggtcgctggagagggtgagtccggcggtcgcggtcgcgggagtgagcgagcggccaggcggacttccagactgaaactgcaggtgcgcaggcacgtagcgaggcggggacaacgacgaactctggccgcgggaggaggaagaagaagacgtgtggcgagagtgtggaggtacggagcggccgtgacgttgagcccgaaggcctggactggtgcgaggctctggggaaacctttcttctctttggggaagacgtcgtggcgatgagctgcgcacctcgtgtcgcagctcggggcaaccaggggaaaatagtagataggatcaaagtagcacccttacttccttttggtggaagtacaaggggatttggttgtgaacaagcgagttcgactggcagaaaatccgaagtttagtaatttttttttccggagcggaaacgaaaccctgggctatccacaggcgaccagcgtctgtagatgaagtgatgaaattaagataattggtgaacagaaaaaaaaaaacgtaggagtacaagtaaaagaagatatgaaaagaacacgatgaaaaagatgtaggggaagaagagaggagaaagattggaaagagctgtgaaggtcttatacttgagggcggactgttcagagtagttcgctcgaggggagagacttgtgaatgggattgattgaaaagctattgtgactcacgtttctcttaacgcgattctagttctattcctattgggggttattgtcatcttaatacggtgctattgatcctattgcgaacaatggattagggcacaatgccctcattatcgcgaacgactcatcagattagactttgcaaacaagtatgagtttgttagcagaaacaacacttggaaaatattaagcttattttgcattgtctccaacctagctgctttttataagcaaagccagccatggtgagatagatatgtacaataaaaataagaaagaagagaaaaagaaagcaaaacctgtaaatcaacgctcctccacgtaaagcctgtacatggtgttgttctccgctcccgagaggattaactccacatcagctcggtagggtataaggttagacgggtcactgcgaccccatgcagcaacagcattgagatcacctttgaatcgcatggtaaggtcgagacagcagtcacagagcatcaatccacacccgcgggattcttcgtcacagtctactacctcagcgtagacattgactggttgaactgcctggcaagacccgaatgcgggctcccgacacaggctgcaccattggtaaggggaagttcgaaaaacagggccagccttgccagtctcggggtcagtcagagcttcacttgcttcctctagaagtgctgcagcatcagtccgcatttggtctttcgttgacaaaggtacaggtagtagatggagagtgtcatgggagcattgtatgattttgcatcgattccatgtacagaagacgcacatccggctctgttcttttccttcggcaatgtggccatcttgtagctcaataattgtgccgttatctaatgtgcagacctctggattgcgaggaccaaggccagtgattccatatgcaaagttgttgcaccagtggcaagggggatcttcgtcctgctcatttgcgagaaacactacaggatgagcaagttcagtccagattcgatgagtgttcgcgtactgcgaagggatggtatttgagggtgtggtgcgagtaggtgactcgagggagtcagagatatagatcggtgagccctgcctcttcggggtgttcggtgtttcatcgtctgaatcagtgattacaatcacctcatgtggcttcggtccctcagcaacggagggatgtgcgctgctgaatagaggcgaagaggtctcccaagaattgccctttgtggggttgatctctggaatctgggtctttggttggataggggaactgagttgttcactcggtttagatacctcagaaacatcgggctctggggttccatcggttgagttggagggtgctggagaataaactggagaactgcttggctcgcttggttcacttgtggcaagcagtgcaaaaggtgcgtgtctagctggtccagcaacacattcgaacccatgatttcggcatgggagacaaggttgtgaatggtcatagtcggcgtagcgatacgaacaaatctctttgttctgccctttgcaacactcgcatgtttgcttccatttgggtggggggctcacgacgcaaaagacatcatcgatttcacatattgtgcaaggataggcgaacggatcggggttagatttaagcgagcattcaaagcctagctcttggcaggcagcgcactctctcagccgaagttcgctatcaggaggcaggacatccccagtcgactccgatgcctcggcctcgacctcggttgtgtcattcgtttgtggtgattctggcagcacgtcgtcattgtaggtttgaaggccgtactgtgaattcggtgtgtctatctcgggattcacggtccagtatctgtcccagctgtcgggctcactgtgttgagacggtgtccaaggggggacataatattcactttccgtgcctgcgctcattctcgaacggaatatagaaatcggagacaagctcctggctcgcttgtctgatcgagggccgtgataatcctcatggaaaagagatagcttgcgcttggtcggtgttctcttgctggaaggttggtagtctttatctttgtcattgtcatgccatgacccaacaacagcggcacgcttgagggcacgctctcgcaagtgatatggtccagcgaggtgtgggagcatgcagaatttgctcatactatgttcaaagacctgctgtgctcgctccagtctccctggagagtatgacatggtggctacgagctgtgaagaagctgctgtcacattaataagtgtcaagatcgtaataaccgcaagcagtaaatacttacaggttgtttagattaaaccaaccaaggagttttgtcagtttggaagccacacctcggttcctcgaagaatgaaaatggaggccgtggctcaagtgatgggtttgattgacacctatcaatgcgaaggtaccttgaaacgcttggaagatgcgaaaaatatgtatgaagatggatagatggtcgaatgtccaagtgacggtagaacaaggaatgttgatataagcattcaatggctcgaactgtacgttagaaagtgaattagaagtgaagattagatgatatcgatgtaaatattgactgcagtctgtatacagtaaaataaataaaataaataaaaggaagtggaggggtctcaatagcaggaacaattgattgaattgaattatattgaattacattcatgtctcgatggggaactgtagcaacatgagacaatagcctttggatcacagaatagtaatactacaatcaatagcaattctcacattcaacgcagaccgcaaagccgacaccattccccacccattatatcaattcgcccgaggcaggattcatgtgtcacttgaaattactcgttacgctcatagagggggcgggggaaacgacacccttcgtgggtatagtgacatgggacttggtcaaaaaggtagtttgtgtaggatctatgaagatataaatgagagcagtctggataggggatgtcgtggcagtagaccaagagatcttggaaaagtcatcaggcatgttatcaattcgcgttggtgtatcgcattctcggcgtcaggctttgttatttcgagctttgctagtctgcccttttcaatgaatcaagctgtaataaatataatggcgaccagcccgaatcgaactaaagcctcaatcctattgggagtcgcttccaatgagacgaacatccccagcagtacctttcgccgtatcgtggtaaccgacgggattgtagatgatgaggagatatcgcagctgtaattcgaagacctagtaggcgaaatagattcagtgtccaaatcaagcttttctgaaagggtaaggctggcgtatatgttaacagagtctcgatcttcgtgatgttagctttggtttctctgagctttgctcgacacaccaaccacatagaatgtcatccatttggtaagaccacacccggtcagatcgcatatcggttcgactgtccgccatagtaacgataggtagattaggttggagggagtgagtggatttagttggtagagaggaagacaacagagtatgtcgtaggcctatcaagcaactactcgacgtctgcccagaatatttgaaggttgattaacgccttagatccccaggatcccaaaccattcattttgtacagttcaaaagtcaactagttatgatgttgaactttaatttatgtgaaatggatgttcgaagatgttcaaattcattgatggtcatatggaaacacgctacatggtattaacacgaaaccagaaagacaactgaagagaaggacaagcagtgaaaaacaaaacccaagtagcgcctgtaatgcagtcagtggcaatatgtgaggtcaaagcactttgattgagccacagccgttcgtgaatgcgccagggtatccatccatcaagtggagatgcaataataataaaagaacagagaagatggcagcgccgcagttatacgccccatcccatgcagacagaaaatatgtaaccaacaaggaaacttttgatagacaaaagaagaaaatcattggccactcgaggcccggaaatcatacatgcgaacttgatagtcatcaccaccagtgataaagcggctgtcgctcaagccaatgcaattgacagctgcgctgtgaccttcataggtatcttggccagtaggaacacgaggatcccagatcttgaccatgcgatccatgccaccagaggcaatccgcagagtatcagcagaaagagcccaaataccctccaggtgtccgaagaaggtacgaaggcatcttcctgtgctagtttcccacaatcggatggttgtgtctacaccgctggtgatgatatagcgcgggggttcaacgcggccttgatcctggtcaaaggaagagccgaatggtgagttcgggagagacagagacttggcctcgagaagaggggaaagtgtgctcaggatgttgtcgccgttttgagaagatgtgctgacgtggtcgttctcgcagtcggcgaggtggttctccagttcaatttctcgaggcaaagcaagaacttgctgaacggccccaatgtggttatggaagactcggatgcaagtcttggtatctaaatcccaaaggcgtgcggcaccatcgtcacaagcagtcagaaccgtgcgcgaagccgagtcgattttgacggcgttgactccctgtgggtgtggtagaacgaaagtagacttgtccttgaaattccaaattttgacagtgcgatcgacagaggcggatgcaagaagagtgcagtcaaagtgaagagcaatgacagcttcagcgtggccattgtatttggagatacattcgcctgtacgccagttccagattctgatgctgcgatccagactaccagtgatcaatttggtgtcatcaaactggaggcatcgcactccggcaacgtgacctttgagagttctcagttcttcgccagtgtctgtgtcccatatcttgaccgtagcatcataggatccagtcatcaaaatgttgtcctcgaactgcagacacatgacactgtctctgtggcccttgaagaccttgactgagcagcgcttgtgcttccaattcataccgacgacaaatcgatcccgataaacctctttccacggacggtaacgagtcttgaaataattgtcatcctcttcaggggactggggaagcgatgcacaatggcgctttgcaagaacggagacttcatcggattccatcttgcgtttgccactgactctaggttcttcgaccgtcgagcaagattcgaccattgcggcttcagtcgacccagcggcaggctcgttgttgccccagttggtagcgcgcaattcgatctcgcgcttggcttcacgcagacgcttgcgatccagaaggggaaggccccaaccacacttgttacactttcggcggatatgttgttcgcacatccggtgccaaaccacatcatcatcggcgagggctctccagcgggaagaaacttgtgctgctctgcacaaggaagccgtgtcgaggtaacgcagaattttgaaggatagctccggaggcagggcaccgaggaaatcgattcggatgagttcgcggacactggcggaaatgtaggatagttgggggaagcaggactgcgccagaattccctgcagcatgagagttcgctgcttcgccggagcagcggagaacaacgaccacacatgggaaataccgcgttgatcacattgaggaagtaagttcagctcagattgcagctgggtcatcgactgttcatcggcttggcgtctgccgcattttgagtccggttgatgccgatagcagtagctggcatttactacgtggtgctcggatggagcggaaacctgtgagcgcaaaggcgcatattgtcgtggctgatatttttcgaggaacggggccacattttgcctgcctagttcgtccagggtttgggtggtattgtcggtgtttttgcccggcggagagcggttggagtcggcgttcgcactgacccccgcgtttgcgatgaccaggctctgctgcgtggacgaagattctggtttatcggccatgatggctgatctggtctcgcgggtgtgaggggacggccgctcgggcgagtgacggtcgtgtctgatgtaccgagataagaaccagtcggtttgcgtatatccctgatctcttgggttgaattgattattttgagcacgcagaaaatatgtcaatcaatctcgcgatgtatgtccttgagaattgctcgacgatcaggatagaggggggggtcaagggctatttgattcaaccttggaagtaccctgagaggaagtattgagataagagcgatatcgagcttccaaggttggcaactaaattccacttgaatgataaagagaaagaaaaaaaaatggatcgacagaggcttttaaatcagatgattattcaatgactgagaaaattgcacaattcggatgtgtctttgatatcgccatcgatcagtccggggaattattgcgtgacaggggcagagcggcaaatacgtgatctgggcggtgaggctgcacgtgacaatgatccgcatgtcgccatctccacgccatcgcacctcaatcaatcagttcctacgcttccgacaggttgattcgctatcatttggtgcgacaggggtgaaacgggccatttgatctttgtatgatttcaggctagtcccgcagccatctcacaccgacaactcacactttgtgagacccactgtccctagctttcttggttacaactgcggatctacggagcaaaccttctgtgaaccgcttgccgtataattcacgtcttaccctgggaatcaggtctcgaccgagaaagcctcaggctgtttttcatccctttattcgcaagtcatttctgggctagagctcgtgcttcactttgggtccgccgtgtagagcacggccctggctcattgtaccgagcttccaaggtccccatgacctagctcccaggtctatggtctacaaggtagccattctctcctccagttttgaccaactctacagcagtctaatttggcaaatataggcctatattgaagtgtcctaggggcttggtggagtgaacgcgttttatcaccccatttaccttgtagctgtcaatcaatttcacccttgcccctaaggggtctaccacttcatcgactctggtcttatcttattccgaatgcgccattaacaaggttaattgattttcaaaatggcgtcatcccagtcctctttatcgtccattcgtccgcaggctggactggacgaggaccaacaatccctaccccaggttgacactttgatctcgtatctactgggtgccaaacgctcgctctcctctattagtcatgtctggcgggccaatgaaatagtcactgcgtcacactcagcactggagaagagtgttgtcctgtgctctcggacaggcttcttacgccgaggcctcaatggacaactccgtcttttatacgacgttcgaaccgaggtcgagcagatatcctaccggggtcgtgatgagttttcattggcactaaaaaacttggatgctgctgatgctcggctaagaaacacgttagatctgcttcgcgggaccatcgtccacgcgtcattcagacctggggatgaaaagcagaagtccttacatgactttgtcgatgagcgaggcgttgaagagctacatgcatctttgaaagcgtctatcgatcgcactaacacagcgcgcgctgaactggatacttccaatcgtgaattcgatgacgaacttcaagccacccgagagtcgcttcgtcactaccacacagccacaaagttggcgtcatcccggttatcaatcacatcttcctcgtcgtctgcgtccgattccggccttctcaccttgtcgtctatgccgggccagattcaatcactggaggcccatgctcaagaaatggccattcttttggaagccctggtcaggcattttgatctctgtgtcaccgctgtgaagcataccgatggcggaggagcagttgcgcgatccatcacaggggatatgccaactggtgttgatggcagcaatgacggaatgccaaacatcggggcagagatcaacgccaatctgaatgcacctcttgatccaatgactgacgccgagtatcaggagatggtggctgttttaatcaaagatgcccccgaggcggatgatgttgtcatggagatccaagatcgcatcaatgagatggaatccatatttgatcaagtgcaagctcagcgagatgccctgctgtccatctctaaagcaacgatcgacgtgcacagtcacctttcctctctcgcctcctcccgcttacctcgttatatttcccaggcacacaacttcacgcgcgtgtggcttgaagaaaatgaccgcattaacactggcctcgctgaactctctgatctgcactctttatacgatgggtttctcaatgcttatgacagcctaatgctggaagtagcacgtcggcgtcatgttcgccaacgtgtggaaaaggtgctccgagacacccggcacaaactggaccagctccacgatgaagatgccgctgctcgtgatactttccgtgctgaacacggtgactttcttccctctgatatatggcatggcgttggcttagcgccaatgcaggtgcagttcactcgtctctcgggcggccacctagatagtggtcctgtggcgcagaatgcaatcgatggacctaaagcagacgactatacaagggctgtcgaggcagaagtaacggatggcagtgccggaggagaagagatccctgacctgccaagagacctcgttgaggaagcttacgcaagggtcaaggcacgaaataaagtggcgtcccaaatgcacaccgcttgatttccgtggtgtctacgcttgcaactttttactttcatccggtacaccgagtgttgtaccattgcaattggcgtccccgacctcgctctaaattccccaccacaattgtagctaggatggaaattggatctttcacatctcaatgccgctcctaacttttacatcatggcattggcatggtgcggcttaaatgaagaaaacacaataggtctgaccttccgtcatgctcctcatatatgctccctactcgatgctcatcttatagatgcatactcttgcgttattcgcgggatgtaagcactgtttgagggcacttgtggggaattcatgacgagagcacggattggagtgatgaccaaagagagctctgataagtttttacccacccgatttggtttctttttctttcgaatcagttgtcaatacttcgtatatagttattatgaatagtctactcttaatgaaagttttcaggttcagtcttgaggagcttggatcaaatatttatgttttcccaattctatcaagtatagaccaaggtatcaaatgcccaatgctccatccatatatgcatttcatcatcagatcatgccaagcggtagatgacacagagtgcaaacattcgcaactcgtgcacatgcaaagaaagataaggtcagaaagctacgagagcttatttcttctttctacaagagccagaaacaagctttttcttcatgtgcttcggcatcttgtttgcccgctgctcacgcttctcctccttgacctttgccttgtggtcgcgcttggagtctttgtcttcgaaacgcttgcctcgtggcggcttcggcgcgaacggatctatttcctcgtcatctgagtcggatccggagacggagacgccgccgcttgcatcagacgcatcatcttcgacagcatcagtagcagaggccttctttttttcgccggccaagaggtctccgtaaatcaggtcagcaccttcgccatcgcggatgcgttcggcgtcacgttcgacatcatacacttgctctagggtctgaggaatatattgttgacggaagacggcggtgtcaacatcctcggcctcctgctgctcatcatcaccctcctcacgggcaacgaggagcttttcgatggcagtcgtcatctcttcattgccagcggtgccatccaatggtccttctggggagatgatgaactggaacacagtccgctcgggaagagtctggatgttctttcggcggaagaagtcgctgacgttcttgatatccatgcgcaggaattccagactgcgcgggtggtcgtgctcaacactttgactgacatcgatgatatacaggcgttccttatggtacagaatgttgtactcactcagatcagcgtgcaccagacgacatgtctggtacataacgcgcatatagcccaacaattcaatatacagtgcgcgccagcgagtttcaggttcagggatattgaagtccacatccttgaggcgcggtgcgcctagaccttttgagctaccgatgaatcccataacaaggacgtgcagacgaaggaagataggctcggggcagggaataccagaggcatagattcttcgcaggtttcgcatctctttctcggcccaaagtttgaccatggcgcggttgttgctcttgttgtaaccctggcggaaacggaactctccggtgacgtacttatcgcgatccttgaataccaagatacttgtcttgtagaccttgatcgcacggtgtagtggggcagcatccgggtcttcctgcgagacggacatggcatggtagacattcgcttcctttccggtcgacaaacatccgtgaatttctgagacgaggcctcggttgatcatttgcagcagaagcatccgcgtacggggatccaacacttgttctgatgtggctcggtctgccttatctgctccacccttgtcgctgcgccccgaaaagccggcctgttggtcgtccagcttgatcttcgcagcatgacgagtgagagacttgacctggtcatcgacatatgcggatgtattcacggtaggcttctgggtgttcgtcttggggtatgtccatctcggcacgttcgagtcgccagcgaggtcgttgattctgcgttggcgattgtatgctttggtaagatcggtgttgtcagaagacagaatatcttcacgatccaattcatcgtcaaaaatgtcgtcgtagtactcgtcgtcctcttcctcttcctcttcctcctgcccatcgggcggatattgccccgcctcggcggagtctgcggtatcagggttcacgtagcctttgttgggcacgtaggtatgcgacggcgcgaggccatcggcaattccagctgccgcggcagtattctcattcgaagccattctggatctccaaagttgagaatgtagagatttgaaatatgtcccgcgggtccccaaggttttttttttttctgtgctcaaattagggtcaccgcccggcagaaccccgcgcccaacgagacgcgctaatttcgttcctcgcgtatgtaggcaatctccttggttttgcaacgaatcacgatacccctcggcctttgtctgttcattactagagagatctgctggccttgatctttgtgatatactccatccttaattttgctcttgcgccaggcgcgttatgctgagagtcctctgattgatcctcgcgtcgcgcgtttcttctcaagatgtatgtcaagcagatcattatccaaggcttcaagaggtattttcccaccccatccgcaatctctatgacgttatgaaatttatattgacctcgtaccaaattcagctacaaagatcagacggtcattgagccattctcccccaaacacaacgtcattgtcggccgcaatggttccgggaaaagtaacttcttcgcggccattcgctttgtcctcagcgatgcctatacccatcttggcagagaggaacgccaagctcttttgcacgtatgtatactggtgttgctccaatctacataggttgaccccaagcaggaaggttccggttcggctgtgatgtccgcctacgttgagattatattcgacaactccgacgatcgattccccaccggcaagccagaggtcgtcctgcgtcgtaccattggtatcaagaaggatgaatacaccctcgaccgcaagaatgccaccaagaacgatgttatgaacctgctcgagtcggctggtttctctcgctccaacccttactacattgttccccaaggccgagtgactgcgttgaccaacatgaaagactccgagcggctgattctgctgaaggaggtcgccggtactcaggtctacgaagcccgtcgttcagagtctttgaaaattatgagtgagaccaacagcaagcgtgccaagattgacgaactcctcgattacattaacgaacgtcttgccgaactcgaagaagaaaaggatgagcttcggagctatcaggagaaagacaaggagcgccgctgtctagagtacaccatttactccctcgaacaacaggagatcggcaaggttctcaatgagattgaagagcgacgacagaacggcgttgaggatgccgacaataatcgtgaccaatttgttgagggcgagaaggccattgctgagatcgatgttgagatcgctgagtgccggcaacagattgagttcctgaaggttgacaaggctcaactagaggacgaacggcgtgaagcatcgaaaactctagctcagaatgaactgcaggccaagtctcttgctgacaaccaggctgctgcacaagcattgaaatcccgctacgactccgacctcagctctgttcagaccgctatcagtgagcgtgaagccgaacatcgcgaaattcttcctagattcaatgccttgaaggatcaggaagagacagttagatcacagttgacggatgccgagacatcgcgtcagcgtttgtatgcaaagcagggtagaaactcgcgattcaagaacaaatctgagcgtgacaagtggcttaacatggaagtccgcgagagccataattccatcagcactgtccagggtgtgatctctcagacacaagaagatatccgagaccttgaaagcgagattgccgctttggagcctgaaactgaacgcttgcgccagcaaatcgatggacgcggcgacacaatgcatactgtggatcaacaagtccaagatgccaaggatgaaagagaccgtctcatggaccaaagaaagtaagctcgcttgaaccactcataggctataaccagacattaatgattatgtagggaactctggagagaagaagcgaagcttgactccgtgctttcgaatgcatcccaggaggtggaccgtgctgagcgcaatctctcgcatatgatggataacaacaccagtcgtggaattgccgcagtgcgtcgaatcacgcgtcagcataacctcgaaggtgtttatggtactcttgccgagcttttcgatgtcaatgatagatatcggaccgccgtagaagttactgccggccagagtttattccactacgttgttgacacagatgaaactgctacaaccgttctcgagatcctacaaaaggaaaaggctggtcgtgtgacattcatgcctctgaacagacttcgtactaggccgatgaacatgcctcgtgctagcgacacaatacccatgatcgataagttgcagtacgacccggcatatgacagagccttccagcatgtgttcggcaagactatcatttgccccaacctacaggttgcgtcgcagtacgcacgaagccacggtgtcaatgctatcactccagagggtgatcgatcagacaagcgtggtgccttgactggtggataccacgactctcgtcagtcacgactagacgctgtcaagattctagctaagtggcgagatgagtatgagaccaagagaaatcgcggtaccgaaatccggaaagagttagaaaaacttgaccagctgatcactaaggctgtcggtgaactgcaaaaacttgagcaacaaagacatcaggtccagaacagcagtggacctttacgacacgagttgagggccaaacgtgatctcctccaaaacaagaccgatactcttgatgccaagcgacgcgctcttcgaaatgttgagtctaaccttgcggccctgaacgatcaagtcaatgcgttccagactgaactgtcttctcctttccagaaagctctcaccagcgaggaggaagctcaactagagactttaagcagcacagtgcaagatttgcgccgccaataccaagagcttgccggtcagcgaagcgagctcgaggcacgcaagtcagtgttggaagttgagcttcgagagaatctcaaccctcgtcttgaccagttactcaacagagacattgacatcgccgacgaggaagttcaaggcaacttgaaagagacacagcgtgaagtgaagcgcattggccagacgttggaaaaactcaacgcccgactcaaggaagttgacacctcaattgaggaaggcacttctcgggtgatagatctgcagcagcgtaatgcggagacccgacgagaaattgaagacctcgctcggtctattgaaaaacaccagcgacgtatggagaagagcatgcaaaagaaggcagcactcactaagcaaggtgccgaatgtgcggctaacatccgttccctcggagttcttccggatgaagctttcaccaaataccaaaataccgactccaacactgttgtcaagaagctccataagaccaacgaggctcttaagaaatattcccatgtcaataagaaggcgtttgaacagtataacagttttaccaagcagcgtgagactcttactacgcgtcgttctgagctagatgcatcccaaaaatccatcgatgaccttatttctgttcttgatcaacgcaaggatgaggccattgaaagaactttcaagcaggtctcacgcgagttccacaatgtgtttgagaaacttgttcctgccggtcgtggtcgtcttatcattcaaaggaaaacagaccatgctccccgagtcggtgaagatgttgactcagatgacgaggcagctcggcagagcgtcgaaaactatgtcggtgttggcatcagtgtgagcttcaatagcaagcacgatgatcaacaacgtattcagcagctgagtggtggacaaaaaagtgagcatttccagtccgaatgcgtattttgttttgctgttgctaaccaatctcccatgtaggtctttgcgctctcgccctcgttttcgccatccaggcttgcgaccccgcaccattctacctattcgatgagatcgatgccaacctggatgctcagtaccgaacagccgttgcacagatgctcaagtccatctcggattcgacaaatgggcagtttatctgtactaccttccgacctgaaatgctgcacgtcgcggagaagtgctatggtgtaagcttcaggcaaaaggccagtactatcgatgttgtctcccgcgaggaggctctgaagttcgtggaggagcaaaagacttgatgtatttcccaggcgtgctctttgtatattgtaatcaacatttgcttcgatggactagctggctggcgtattctgataccgaactctttttttattcttcaatttcaaatttttattcttgcggcgtagttctttgtatatttctcaacgaattggatttccttgaccgacggacttgaaaaagaagcgaagcttgactgcaggcaaaatcggatatgtatgtggactggcactgtataaatgcgacaaaacgatttcatttcataatttttacagcgttttcacaattcaagctagctcacactcaatcaaactctccacgccccgctgcgcagtccaaatcttgacaatcttcagcccagcagactccaacaacgcatgccattggtgttctgtacgctcaccagatccaatctccatcataatcaaatccagacttgtggtttcccaataagcccccgtgtctggaatcacattctcgttcaccaacaccttgctataaccaggcttcatagcagctactgtattagcgaggatattgcgacaaagctcatcaggccagtcatggagaacagaatgcaagtagtacgagcgggctcctatgcgggcagaatgttagtatatgccagcaatcgatgggctcaatatttcaatacgcatggtcaggggaaagtcttccgtttttgtacctttgactggttgctcagtaaagaaatcatgagcagtaacttcaatcgtggggtgtagatccttaaccgaaaccaccacctcaggaagatcctgaagcaccagacgaccggggaggccaggccatttccgacggaaatcggatagatcatggccgaaactgcctccgagatcaacgagcaggacatcgtcctcgccaatcgtgacgccgtccacaagccgctcttggaccgggtagaagccgggatccatccagcgtactcggccttgcccgtagactgacatgtgattattaaactgctttgccgtgagcggttcttgctgcaaatgtccgaagaagcctatgtctgtttcatagcccatctggaatgctgtatctgtcggacttgtgggattttggtagttgtttttcttgaggaaggtcggtagagccataatacctttggtgaaacggcgtgtcctgaacttgttagtcggggttgagggtatggagctctgactatcaacctacatgagcggaaatgcatcgctatatctttcaacagtaaggacttttgagaagccagtcgggctgtactcgttgtagccggtctcggttattgttcccatcgcagcgagatgcttcatcagtcgccctacacgatttgtcagatattgggttttgctggcgtacaaacaaactactgaccgagcaagattggatccacactggttgcctcagcaagctcattgacagtcttcggtctgtcatctgttccaagagcagagaatagatgtatgtcaacagcggtctctatggctgcataactcgtagactaagcaaatgcaatacccatcagtcgaaacagtttcaaacttgtcttgggccacattatggtagttacaacacacctcagaccagcagtgtcgaatgattgcctctcggggggtttccaatgcataagccaacgattggacggcttctagtagcttaagccgtgctttggggtcctgggcaaggaggtctttgccatgactcgcaaccgtttcaaggagatcaggcacggtatctggcaggtttgagatgagagcaagaccctctacatcggttgcattggacgccatgatggactgtgtttgctgcgatgtatatgtagaagaggaagtgggagtcaagaagtatctcaacaacacaatctcatgttactaaattctagttgccaacatatattgtctagtaaaattgccaaccccctgacaggatcactatccctgtctcctagtacattagtacatacattagtgtcatattttgttccaggttaagcgaccttaagccacaattggttggttattgcttctactgagctaaactctatgacccatgcagtcattatctaaccgagtgaattctccaggactagagctattaacagctccgcataatgcaaggatattggatccacgaacaatacacgcattgactggttcatatgaatccgacaggaaatcaaaggtacataatacgagaattactttccagggttctacttagcgggaccggggcttttcggattcaaaggtactatcttattgtgcgtacttttgtacttagtactataataaacgaggcaatatatggagtgcaatttgtgaaaacacgctaaggccgtactgtctgggggccaaaactatggacttgttgttaagccaatcgcgatcctagcgctttaggaccctgatttttctagggaagcgattggtcaactcagctaaacatgacgctctatgatcccgtaggtacgtgctataacaatagtacctaagtacaaattcttttagaaataatatgtcctcggctggccatttctccacatttctttttggtcctcttaaggccagagaaaaccgtgattctcctataaggaacacatcggtcgctactctctatcatggcaaccatggacgctgaatacataaaccagacaaagggtccacgtattctaggggtcttctgggcttttttcagtgtaagcgtggtgatggtatccttacgattttatatccgagtccgagtgttgaggaacattggactcgatgattatattgtcctggtggcaatggtatgtaccttctagttgattttgagatacgccagataccaattacataggttatggtcaccagttatacaattctcaccacggtgaacgtcgttttaggctacggaagccatacctctgtcttgatggaaaaaggcgagattgacttgatcgaacgtattctagtcattaattatgcaaactttgcactaggaatcatgtctttcacaactccaaaactggcaatcgctgctctcctgaatcgcatcatgaatcccagccgcttgagccgagtatggctatggatattgacagcctcggtgttcgtgacatccaccatctgcatcatcgttctattcaccatgtgtgatcctccccgggctttatggaaggtacatctcatgagtgagggggcaaaatgtcgttcgaccaagattttggtgggctatgcaatcttcactggaggtatgtttctggactgtatgtttttcgcaaaccagcaactaaacattctcagttctgtcggcgggggtcgatctatatcttgcagtttacccgactgtggtattgctacaacttcaaatgtcgattcagaaaaaattggccctgtgtgcggctttggggttgggcgctgtgtaggttgattgatgttattgtctggagaaagtagctgatcgtctacacagagcctgcgcaatggctattattaagtgtctacagctaccaggtctatataatacggaagactcaacatgtaagttgctttcagtgcataacatgagatatatatcactgacacggcataatagatgcgacagcagatcttgttatatggacgaggtatgttttaagtcctgtttttctccggccttgacacaaaaacttatatcggcgtctcatctatcagcgtcgagtccaacatcatcataatggcctcctgcatcccaaccttgggtccgatctatgaaatgattcgaggcagacgttcctggagctcacacgcgcgatacgagagcggaaagttgcgctcttacacggatagacccacgaagaaatcggcaagcaatactcgcgaggacgaggatatcctcatgaccacggatattagggttacaaggagcggcagccaagaaagcattttgaactcggatcaactccggaaagaggcctatgtggcaggtaagattcatcgcacggatcaggtaaagatcgagtacgagacaagacctcaaggtgagaatggacctgcaccttcatggtagcatggtttgtctactagtgtactactacctcttatgatcattattgcgggttgactaagttgtaacctttcaactctacctaattccatcttttcttcccgagcgatgttgtcgggagcaaaatgcttctaatctatcaacaatcctaccagcaacttcactcgtttacccattcgaatatgatatcctcggggacatcacggaccaaaatatggacatgctccaaggcccgcacactctgtaggccaacccaattcttaaaccatagcacatgggagtcagggtctgagaagttttggggatccttagccaatcggtgcacgaaagtcttttgaacaaaaccgttgatgattgcacgagattcatcggtcaaatggccctcatcggattgtacggggataggagtgcgtagccacacgacaagatgtgagattccgggggtgaggccatagggccagtcattgcggaggatcttgtagtcctcgggatcggcaaagggacgcgggttcttgaaggtcgctgtcccgctttgctggataaccgcggagccagtgccgctggcagtgttcagcggcaaatcccactttaatcgccgctggcaaatataattcatgatcgtgccatactggactttagtctcttgtgtccaggccaggtaccggcggagatcggaaggcttccgcttgagtgcgccgaggtcatttcgtgctattacggcatatggcatgaggggaattgttcgagcacaagtgagaaatatacttaccgatgatgctttttaggtcttcccagtcgtggtatacgtactcctcgtcggtcatggccaggagcttgtggtccaattccgttagattaaaggcagggacttctggtacttcgggcattttggaaatgatcaaaagaagaaatcaaaagcgatgtcaagcaaggcaatagcctcagtaaatcgaataactccagcaaatccagtaagtccaagtccaagtaagtccaagtaaacacggaaagccggggaaatcgtaaccccaaagggtgggaaattccgttgggcggagccccctcatctcttttttatcttctctctcgccttttcttcttctctttctgcttctatcgcaactgtcttattgaaatacagtgtccgagttctgtcataatgaggtgagtcgatcttctcctgtaatatcgaacaatggctgattcctccaagcctcgccaacatcggcacggccctcgtgccctcggccctgctcatcgcgagtgtttacgccattaagcccgagtttatcgcctatgcaattgctgtcgctggagttctggctggttacttggttttcagcaccagtagtgcgtgcatctttttatgtccaaatactggagtgaggaattaagctgacccccgatgtcgcagagcctcgcaaggtcttgaaccccaccgagttccagaacttcgtcctcaaggagaagaacgagatctctcacaatgtcgctatctaccgttttgccctcccccgttccaccgatatcctcggcctccccatcggtcagcacatctctctcgccgccactatcgccggtcagcccaaggaggttgtccgctcttacacccctatctcctccgacaacgaggccggctacttcgatctgctcgtcaaggcttacccccagggtaacatctccaagtatcttactgaactgaagattggcgacaacatgaaggtccgtggccccaagggcgccatggtgtacacccccaacatgtgccgccacattggtatgatctccggcggcactggtattacccctatgctgcaggtcatcaaggccatcatccgcaaccgtccccgcaacggtggcaacgacaccaccaaggttgacctcatcttcgccaacgtcaaccccgaggacatcttgctcaaggaccagctcgaggagttggagaaggaggatgatggattccgcatctactacgttcttaacaacccgcccgagggctggactggcggtgttggctttgtgactcccgacatgatcaaggtaagtttgcgtgctgtgctcgcctgtgccacctcggtattaattaagctttattataggagcgcctgcccgcccccgctgccgatgttaagattttgctctgcggtccccctcccatggtcagcgcgatgaagaaggccaccgaggctcttggatacaccaaggcgcgccccgtcagcaagctggaggaccaggtcttctgcttctaagggattcgctgcgaatcaaagaaaagttgctgttttcgaacttgactctgcctttaataattgtgaatcttctacagaatgttagcgggcccgccgtgaagcatttttctttttttgatgtataatctctggtgtggttatatatgtgaatagacctcggcctacaagggattaaatgagcgcaccggggatcgaatgcgtgagatatccgcctaaaccttggtattataccatgttcttaattgtctaaaagtcaagactccagccaaagcaatggctctaaaaattcccatgagcgatgtccccttcaaacccctctgcgctgcctctgaatccatgaaagtcctaggattcgctcattttcatcgccatcagcttgtcctcgggctgggatttgcctggtggctttcccaaatccgtgaaaaggtccttatgccggcaccggggacaacgactctcctcaagttcacttggggagagtactatggatataggcagcgggggtagatcatatacacaaggctcgcacatgcggcaaaacatacagtatagtccatatcgacatctctctccacaacaagcgcagggggcttcctcatggccgtctactttaatgaagtcacctggtcgatatatcctgttctcgcagccgcaatcgaagcaaaatcgacggtcactctcggcgtggccttttccgcgcttggctcgtagttgattatcggcaaacgcttttcggggtcgaaatttcagacatatcttgcacgaaaagaggtggttatatctggaataattagtaactaggagataggttgatcgacatagcaagactttgtcatgctaggaagcagctacattggccattgctctatttcaagtagaaacgatagtttctgttcttctgtcgtaggcggctttgtaggaacaatagccctgaaacgttggtttgtttggaaaagtgcaacagatgaggggtatcaagagattttatgatatgtaattggagctcggtcggcaaatccaatatagtaatactagtcatactgctcatggcgattagatcagatctcaaattgcatttaccttagagaagaagaatcgacggggcgtacagcctaaatcgacgacagagcgaaaacggctctattaattatagatcacgtgacttctccatatactcccgataattattccatactccttatataaattgatattttccagagcatatgcattcttcacatagtaccctcgtctctatctcgaatatggtgctaccattagtgagagaggtaatctactctttgaaaggtttaagatagatgcatactagaggtaaatgcagacagaggaagaggtcataatattatatacaggccaagaccataattgtacaggcggtgattagagcggtgagccaaaaactagtttatttagtttatcgtagtggtccgattcgtctgttgagaaaagaatgacgtggatgatttttcaaggcctagcgatacgaatggacatactttacttagcaacgtcctggtacagtacctattgagatgtgttctatctagatatgcgctcttacatctagctataaagttgatagtattttcaatttgtcccaaataacaaatgattcaaatcattaattgaaaactattcccgattgccactaggtgcgggcgaatgagagcgggaagatccaaatgataccctatcgccatcgcgaggttgagttgtactccgagtcatacccgaagctgtgattgcacgtgtataagcatcgtccctgtcataagacgatctgttgattgctgtgacaacatatatatcgtcagaactggtattcacgcttcgcaagtccataaccttaccttcatctaaaccctgagaattgttggcattagacacttcttccacgtcttgactgcgctttttgtcttcattgcgatccagcccttgtagagctcgaactccgtacgatgccgtttcgctcatgtaccatacagctaacgcccgtgtcagtatacggatatgaatgccagatatcgtagtccatcaagaccgagacaggcctgcaagtagatatattgacttactcttgaatggcagcatcgcaatctttccacaagtaaccgcagacccaaagcccacagttctcgcgactttcatcgccgtctcggttcgcgttttaggttgcgcgactttctggcccatcggcacgggtgcgtcattctcagtctagacaatcaataatctggtcagttctgggtgtccacttgagctaagccgcattgcgcttgttacctcgcgtttcctgtgcgcatctgcgatatgcgagacagtaggtttgatgatggctttgatcagacttatggatacgccctttgcgtcgacaaggaacgtagtcttgactttttcttcgacgagttcgggggttttatcgcgtcttgtgtgtgctgggtactcatccctgtttaatgtcattagctcaagttcccaagttcaaaccggactggccgagtcaaaaaaggacctacaattctgccgtggagccgcctcctcttgtcgaaatgacgaccacatcagcctcgaccttgctgctaaacgatggttgtaattgcatgcgatggatcacaggctctgtgtcagcatcactgcattgaaccttctcccattttaattggcgatagaatgattggacggcgtttgcagtgccgttctctccctggatcttctggcctaaccttgaagcaactcgttttacctctggtcgtaggcaatactggaacgcctcgaaaaagacttcgctgctgagcgcttgctcgcgaagtggagatggaccgagtcctgcgttgtagatggtcgttgcccagaagggttggctaagaattatcagcgtgaaaccttacaatttaggctcatgcgtggcccgatcaaagaaattcaaaaatggaaggcttactcgcaaagaagtggtagtgagatcattggtttcccgtttttagcaccctgtacgaaggtgtatagcggccaacagtcggatgcctgattttaatggttttatcgcctaattgggactagctcttaccagttttagaccgcctttgacaccgctcaataccatcttttgtaagtacacatcgaagagacgaaactgttaccatggggtaattcaaatgccttctacctattttaattctcaaaactacattcaaatattcgccacgccggagccagaggatacggagagtttgaagtttatacggtcggtaggaatggggactttgtgttgaaatccaggcttggctttccaaccgttttgggccttggtgtcagttgcgctattagcttttctccgggaaagtgcgggactacggcgggtatgaatggctttaaatacaggagattcatatagttggagggccttaacgcctaggatcgatgagaaatagtattttggggggggggggggggggtatgcaaactttctttttccaatttttaaccnnnnnnnnnnnnnnnnnnnnnnnnnnnnnnnnnnnnnnnnnnnnnnnnnnnnnnnnnnnnagatgggggggggggggggggggggggggggggggggtatgaatagcttcatgtttcaactttcaagctgttctcaatttggtactaggagatctgtcatagtaattcaggtattttaatttcctgccggtctaaaattggtaagagctagtcctaattaggctataaaaccattaaaatcaggcatccggctgttggccgctatacaccttcgtacaccctgcttgaccgttgggatgtcaccacttgtgaataagatcgatactcggcggatgagccattctttgacttttgagaattcttcaattagcttcgttgttttcataagtgttgatcttatgcggaaattacactcaccatttgggtcattctctaacaagaaaatcttcggcaattcagaaacatcaattgcttctcggaacccactcggcagaagcaaatatatcccatgcttctgtgaagcttccacgagatattgaacgaataactcagggtttttcagttgggtgatgtccagagcaacgaagacaggctcaagtgcggaatcgaggaaattctttagcgcctttgacggggtataagaagatgggctttcgattgaagtatagccggaaatgtctaagaactcatgttagaaaagatctcggtcgagtccgagactggttttgcgcataccaatggtgtcatcccagtcctctggtttggggagcaattccgatgaccatagataggtatgagggatctttgattctcttaaaatttcagccccgctagatagaggcagctgcggtaggtctaggactgcttttcggaaatgatcgacgacattgcacaccctagagtactgtcaatgactgtctttatacggctggataattcgagggtcagggctatacttactcattccacgccgactcccagaccagtagataggaaatatagttctgcaactggtaatcaatctcactccccgtcgcgatctgtgctagcgggtgtacgaatcgtctcgtcggtgtccaggggctgttggacattatatgaagcgggatggataaccgctccgcacaatgaacatgagcgtgtgcaagaggtgttgcgatgatggcgttggtgacaaagggcttgctttcgtgcgagccggggtagatgcaggcattccaacattccttgagtgtgtttagcaagacctttttgtttttcaagacctggtgcctgtcaaggccatttgaatcaggcatgaggccagaatcccttgcctgttatgtatgagttgtttgtttactgcagtaccggtgaagatatgaagaggaacttaccgcgataggatgctctgggtcgttgctgatggagaaaaattccaatccggccctgtgggcgagcgattggaaaattgagtgtgaagcgactcggactctgtggccctgtcggtggagttcctggccaaccagtataatagatttgatctcctctgtcatgaccattagcatgggtaggagtgccctcggcgatgttcaattcttacctctgcttcctacaagcatcaaaacaatatccagtggaatttcatgagttccagatacggtcttcacatcatcagtgtttatgggaagtaaatctgagctggagctgttggcttgaatttgtattatccgtggtcgttgggcaggcaataaaaattgttcgattagcatagacgtgcgattcccggcacttaaatctatgctaaagcgaccgatgtctatatcgttgaaattagttagcacaagaattttcaaatgtgtacttctttctatcttgagtaccttcgatcaggattgattcccgcctttcatcccgggtggttgacggtgaaagtagtaggtcttcggagaatagagagctgtaggtgggcggtggtagctcattagcaattgaatggtcgtccatttggctgccattaacaatatcttcttctctcagctcttgtttggagaacattttgctgaatcttgggcggagaacttcagcggaaagatcgcattattaaagataccccagtggcgtatggctaggcaacttcttttttttcttccccttgaaactactattaaggttcttgaccgttgatgatccttctagaaccaatccactatcgtgttgtctagggtttctatagtcggatcgaatacgaacccgaacccgagacccacatcttgtcaaggttgctactatgcatagggtgtgaatattcgtattcggcttcggatcatatcgaaacatacatttggtctttcacagtaggagtttatgctatctttgtcaaagttgcttcaccatataggatcatcgtctctatttccaagttcttctctttggtacctttataatatcatccggtccatataagaattctccaatcatcaacggaacagtccgagcgaacaatgcatttctgggggatctctcttacctagaaactgactcggtcttttcttttcatactatgatattggtatttttagactaggctgttttgaatctgcttattctatataccctatgccccttctccccgcataagctccatatcgtcaagtttgcgatgtcccccagagataatttgacttgggtggaaaaccaggaaaacgatcgtaaccgcaagcataagagcgccatcaaagatatacgcaaagtactcatgactttgcaaaaagccagtcgacccttgaatatactcgatgactcggtagagacaacgggtcataatcaaagcgcttgcaaaatagagcacaagcatataccggtgccagttcaccgaagtatccattgctgcggaagtggggtagttcgccatccgcttatgaaagatgaccgagacgacaacgaagaagccaaagaagatgatttggacgatcaggccgacgataatcacatcttcgccgagtttcaacttgctagctgacttagcactagacatgattgcgcctcctatggatagaagttaataattgatcccttgcgtgagagcgatatagcacttcttacctccactttgaatgaaaaatgacagcacatcgcctaggacaaagatcttggtcaatcttgttgcgcgaatgagcgatctagaatcaccatccaccagacgtatgatccgaccaagaatcatgtagatcgatgccgcaaacagagaaggagcaagtagaataaagagactttgcaaggcgtatggcattgtcgagtaatttggggcttcatgggcgttgactgctcgtgccgcatatccaatggcttcaaataaaccgccaacgacgaaggtgatgaagaatattgtcttatgcttccaaacgaagaagatgtgcccgcagattaggaagacaaaaagaagcaagaaaataattgcggctgccagcgagggtgtgtagttgtagagactgtaaccggacattgtgaatgacaaggatggagttgcgatgattcaaaggagggaaagtaacgagtgatttagtgaaaaaatcttgggagaaacgctcaatggatgaaacaactgatctggaaatcgaatacttatttgtatgctgagagaaatatcgacatataatcaatacactatggagttatttatggacattcaaacactgggggataatgagcggagaatattttctctcccaggcagctgcaataaaatgctaattatggagcttcagagcttgtcttcacaagcatcaggctatatccaactgttgtagttcggcagaggaaactggctccgaaaagtccgaatacggacacgaaggcccactttccacatgagtacgaaatataatagtatttttttctacttctatgtttatgcggatcaaactgataatttgaactcatgataaacaatagagtaagctgttgcgaaccgttagaatagttgtatgttcgtgggatagttgattgtatgcctcacaacaattgcaaggtgattgtcattaactagaatccacatttcccagagatctagtgtaattgggactcgcatgacaatcctggaaagcctctagaggtgttaggcatccgtattatcttcttaaacatcatcgttccaaggaaaaaaagcggcgcaatgcgaaacgctccatattgcttgattcttgattagtatttttcacgagtactcaagaaactttgaaaccatctagttagaggtatcctgatgccaggtttcaaaatttgcctccaatattcctataatggtcagcaattctgctatcatcgttatcgtgctcgtgtgtgccctcacagccgtctcactcgcggcgggtatattcactgtcgttaaccctgccacccatatgctatcggcaccgaacccagagcaacaaaagtatatgcgagaagtcagaattaggcaatttcgtcagctgcgacgagaaagaaatttcagacctgagatttttccaaggtaagtactagctcctaccacactctgattaatcttactctaacaatttggcagagcaatagtgaacattgaaagccatccaagcctggaaagtacgaacgagccgtgaatcacgagcttttttattgcaattgaacgagtcaaggaggtttataatggggtctacgacaatgaagtgtacttaaagagataatcttgatacgatcagagaacaatcggtatttgagacttgcggacgtaagtacgttttacttgctaggaagaggctactatctatataccttgcattgctagtctgctatcaactcttttcttggtaaggctgagtgcatggcgagttttcgtttctagtagtccaatggcttcttcaaatctactcatgccacactagttctaaaactgcgagaaaatactcttcaacactttatttagtgttggcaattccccgttctttattcttcttccaatattgttgttcgagatcacgtgacccctacgtacgcaatatttgtcccagcaatagctagtttctcttttcctctctacgcaaactcgatattttccaagagtgtctacattatttgtgtggtattctcgtctgtatctctaactttggctacaaggttaaagacaaaactcgagcatggccggtggtttccttccataccacgaacctggaagtatgtacacaagcatataccgattgatctctgctcatttcctcactaataaattactgcagctgtcgacatcctcattatcgtttctttcttctttttcctttcccttgcaaaatgggtctccgcgacagtgatccaggccggaattataggtcagatcgccgtcggcatcatttacggagtaccattggccaatatccttaaatatcactggcaagagacttttgttactctcggatatgtcggtctcattttgatcattttcgaaggtaggcggaaatttccttcttgcctggcttcttggcctcttggcctcttggcttcttggatactgacgtcatctatcctaggcggtcttggcgcccgtgtggacatgctcaagcagaacttcactttgagtatgataagcgccgcaactggagttttatttcctattggactctcataccttttgctatatcttggttttggatatggtttgttttatttatctcaattcctacggtcaacagctaacatggactaggtgcggtcgagaccttcatcatcggcgcatctctttccgccacttcactcggtaagctatctttcctcgaaattcggttgactatgtttcaattgctgataaatattagggaccacctttgctgtgatcagctctgcgtccgactcagtcaacctcgccgagactcgagtagggtcagttctagtaagcgcggctgttatcgacgatgttgtaggacttgttatgttaaggtatgttacttatctgaacttgcataaggtgcgtagtctatttttttttttttagctaactgtctacccagtgtggtcgcggatttgggcaaactatcaggaggtgatagtgtcaacctgggctggctcattgggcgtcccatagtggcatcgataggcatggctgccgtaacacccatcgtcaccaaatgggtgtttgcgccatttttccgaaagttcgttgaataccgctttgcacgctacgaccatatctccaacatcatcctcatgatccttgttctttcggcttttattgccatcgctggctttactggaacttccgtcttatttggtgctttcctggccggtgtatttcttacatacataccgagcaagcaccccgagggaccgtttgttgtcctgagccgcgaggaaggcgagcgcgacgaagataaaagccccactttcattcatacctttgagaaatacctgttaggaccccagcagtacttgatggaaccattgttcttctcaagtatcggattcgcgattccattcttggagctgtggaccggggaacgcatctggaaaggaattgtttacaccctcttgatggcttttgcaaaggtatagatacccttaaaggtcgttcctcggcaatcaaactaacatagttatctagtgtgttgtcggaatctgggtccccatatggcaactcgctttggggggtaaatctgacacaaagctacacgaagagcaggaaatacaggggcaacagaagatcgagggcaacaatcccagcgatgaaggccaaagcgaccaagagaaggggaagacgtggaaacggacctggctggccacaatacttttaggatctgcgatggtagcacgcggtgaaattgggcttctgataatcgaaaccggatacaacgaaacttcatacgttagtaatgaaggcttctacaccggcatctgggcgattcttttgaataccatcattgggccagttggcgtcggtctcctggttcgattctacgcgcacgagctcaaggggggtgattggggagtgcagcgtactccggctatctcgggctatggttctagtgaacatggggcggtatagcagcacgtaaaatgttcacatgctatcgaggaagctatataaccgtttttgtgtgaagattacacgccaggagttagctcggtgatccggaccaatagcggaaaacggcccgcctgggaaaaggcaagcaaaacaagaaatctcctgttagggagaacggggaactttatagaaccacggccgggcaagcactgggactggtggcgctaaaccgaaagcaaccgtcgtaaccgtccgatatggtgtatgcagtatcgtcggcgacaacgggcaattcaagccaatttccttctcgtcttggtgtggagaggagccagagcttattcctttgttattacataaatcttttgttttgattagggtaccgtaaacgtttttgagttttgtttaattcggttctcttagtgttgaacgcagcctgttttaaccattccagggttgtggtaactcttttggcaaacctgattctgtgagtcactagacctattggttttcccatcaatgcgggggaagtccaaacggtaaactctagctgaagcctgaacgttgcattatccagtaggaatgtccatccccacgtcatcgttcggcgctcctagaacagaactcgtctttctttaattaaaccaactcgccggtacctggttgtttggtacattttcaacccttcgtctaattctatgtcggcatttgtaccacgttgcgaaatggttggttggctcttacatctattcatccttcatctacgatgattaccctcctttcacctcatttcgtacttccagcggtcagcgaggatgacatggtgattgcttcactcgcatggggcttcacgattggctttgggtggctcactacctggacagcggtgaagcagactctgcacatatataagagacatggtcgccatatcttccataatgcctatgtatggatgatatggctcgagattctagtttgtctcatcttcagtgtgctctgctggttatacctgaggggtacgattccaccaaggtgagctcgaaccaatccgagattacggaaaaggagtcagtgctgaccaaattgtcagctttgccttctatttctgcattggtatgtccacttggggctcttattatcttatcagaatgcttattttgcgaagttactacatgggccctgcaagtaaatggctctatgcaaccttaggaaactgattaatgatgcgaatcttttcaggtccaatttctcctacaaatcatcatcaatcgttgtgcaattcttcttgtggatcgaaggaatgcaaaccgtctgaaggtcggcgttgccatcttaatcaccgctatcaatatctcagtctacgctatttggattcccgcacgtctgcaaatctccgaaacttacatccgggtaaatgaccgatgggatcgttgcgaaaaagtcatctaccttcttgtggatggagcgctcaacttttatttcatacggattgttcgatcaagcctagtgtcggccggcttgggaaaatacaaaaccctagtccatttcaatatcggcattattggattgtctcttggtatggatgtcttgattatatccatgatgagcttgaataatacatttgtgtgagtaaagtcctaaaaaatcaaaaggaaaactgctaataacacccttagctatatgcaatttcatcctcttgcctatatggtcaaactcaacatcgagatgtcaatggctgatcttattgggagaattgctagtgatcgttcttctgtcatcatctgtaatgataccttggagttggctggcgcgggggacacacaagaggttaggttcgtctccctctagccacaactcggtggatgcacaatacctgtattcaaattatatattaatcgtatctaatacagttcaaagaatgcttaccgtatattgactgagagccgaggctatatatttactgtgtggggcaagttggtagacatccttagaagtcctaccaagtattgactacctgcggtatgcacaatagggctatatctatgtataaaaggacgttatgctgaaattctagcctttttgcctgtcaatagctatcgataaacatttttgatactatatgtcggaatttttcatgaatagaaatatatatcttcgtcactgctgtattaatttcccacaatttcctcaagtgattagatttcatatagaaagtaataatctgtaagaaagtatggaagaaggccttttctggttggtatgaggctatagtacggatggcctcgcggtgacaaataaatcgacgagcagcgtctgcgtctgtgatagattagtgtgtgaagaagctaggggcaaacgtggctttagatactgctagttgcaacgctatgataggaaatgattctttttagatgcttgtgatatttagggagctcctaaagccctcaagcatcggacacgcactagctacatcaagcaaaaaccaaggactaaggatctttacaagtatcaacccaccactccggatgcaatattcgatcgcacacattatctctacaacattccttgccttcattaaagggcttacgatcaaatagcaatttgcggttgattgttgcattcccattcagaatttggaccctgtaccactccgccagtcctaaagcgtcggcaatgactccatcctcggtgtcatgcgctttggagactggtagcgagatacaccaccggaattgtcgatccatgggctcaggagtaaattcgaacttcatctcccgaatacgttcaattataaggcaaatcaacgctccgtcggtgcgaagataaaaatggtccttggtagtaaaggttatattgacccacatgttttcgggactctcatctacacctgggccgtggtggatggtaatgtaatatgacattccgaagcccgtagaatgttgaggggcttgtattctggtgccacctgtaccgatataattttggtttgtcagtgagctagatgctgggaactgaagcccaataaatacgggactagccgactataaaagaatgtttccccctaagacatactgctttggactcttttggcgagaacaaaggcattctattctaatcccattgttagatctttcatacgtttaaattagcagacaaagacttgaaattaattgcatttttcatttttttctcgccattctatcaggccccgtagtgttctcgggagtagcgttggaggccatttctggtgatattgggtacaacgacaaacaaatgggctacagatgtgccatctttcccctcccatctgcttctttacccttgcttggtgttcttctcgagtttaggagggccgccttggatgagtttgtagctagtgctagaaaagtgaaaggtcagcaaaaacacatggaaacagacagcgcggatggactgactactccctcttcatagacctcggcctacgatagttagcatggaaccataactagcagaaagaccgatagacatacggacgtatctgatcaacggagataccgggatacttatcaccttctttcttcaagacaagttagcataaagtaagttatccctagtgtatagaatactcactaggtgatactggcgtatgtgtcgacgcagcattggagccgggtttccaatcttcgccgtcttttcagtcttccatgagcagtaagggcaccgctttgcacagtccggaatgaactaaacatggtacgtgtcagtcaaatgaacagaaggttcagacagtcgagagtcttacaagaatggcatgctcggccggccatgtagtttcggggtgctgtgggcagtcgcagagcttcgcgttggggctggtattatgttagccagtagtataaggtaatgagcttgacgtcttatggtgatacgtacgcccatgatgttggctcagtaggacgagagcttttccagcaatcgccgtgtggccacgaagacggatctggcaaagcagtcgccgtaccagtttgggcgtttgaggcctcggtatcaaccagctgactaggctgggaatttgggcaggaatcgccctttggggtcaagggcgactccatgtcgtccgtggggttgcgctccatttggtttctacaaggtcaccatgaagatcagtatctcatgggtcagaggaagaatgaaagaagatagctggctactgaccgtggagactgatgggtggggtatgtcgcgttgcaaaggtgaaagtgagaaacgcggattgacgggtgcggtgtgtcgcgttggaaagtgaaagtgagaaacgtaggttcaagacaagtttatcagataaatcgcggttaccgttggcaccatgcttccatattgtcggattctctcccatcattagttccacttctcgcaaatttggactacttgtgcattctacctaactaaaagatacgtcttgtcacaaatttggttcggggatacgggcattttcgaagattttggagttactcatatctttcttgatgagtaaatacccaggtacagactctaccgtgagaaagcagaaagtgacactcccagacctcagaagtgagaggaaaaatagatcatactcgtatattaaagtataactacgtacgaagggtgaagaagaatcaccgagtagcaactactagagaatatatatctattacatttcgatcgtatccacaatcacattcaaaattttcgcgcgatattcactcctggtcggtcgttgtaatagtgatctctttcgaaacattggaagtgtgtaccacatgagagagtgcctgaatttgctgcttgtgttgaacagaaattcgagtatagcgcacgataatcccagttcccatcagtgaatagcagcccgacttatttcatcctatgaaatgcatatgtagggttttagtagatcacgttcaaaagtgacgtcacctgatatattcgataagatctgatagtgatcacgtgactcaccgccctctttgagtcagagtgagtcaaaaagggaaggaaaggaaaaagaaaaggcaaaaaaaaaaaagatcccccgagcgatttccccctctttatgggtcattgtctaagcggggctcggcgattcactgccattttttctccgttgcgttgcccctctaaaccttcgacttttccgattttgagacgcgcattcggtacacgaagattctcaatcatgtccgcagcttctcttcctgcctctgttgaggctctgtcgctccaatccacggcacagaagtctcaatttgccggctgcttcccgacactgaacccgatggatatttaccgccagcacatcgcggaggagttgggcaaagccgctggtatcgattctcagaagatctacccgcggattgcctggactagtactttggacaagggtgatctttcattgccggtatgtggcggcatatcctgggcgcaattcgcatgttccgcatgatcatgaggccttggactaacaatgtcttattgcgtaccgttaggtggcttctcttcagatcaagcaaaaccccgtggagcttgccagggatcttgtcgccaagttccccgcctccgaccttattcaccctccaactcagcttggtcctcacatccagttcttctgcaaacgtcagccattgaccaacaatgttcttggccgtatcctgaaggagaaggccgcctatggaacaaatggtaatcagggtctgaaggacccctccgacccctccaagggccagaagaagatcattatcgagttctcatcgcccaacatcgccaagcccttccacgccggtcatctgcgcagtaccatcatcggtggtttcctcgccaatatctacactgttatgggatggaacgtgatcaaaatgaactacctgggtgattggggtaagcagtatggtctgttggccaacggcttcaagcagtttggcgacgaagaagctcttatcaaggatcctatcaaccacctattcgatgtctatgtcaagatcaaccgtcaggtcagtgaccaggagggacctatcaaggagctgaaggaacaaatcaaggcaaagaaggagaagagcgaggatgttgccgagctcgaggcacagcttgccaagcttgtggatgtgagcgaggatgagaaggcccgccgctactttaagagtatggaggacggtgacccggaggccctcgctctctggcgcaagttccgcgatctcagcattgagaagtacaagcagacatacgctcgtctcaatattgacttcgatgtttactccggtgaatctcagatcaagtctgagagcatgaccgacgcgtacaaggtcatggaggaggctggtgtttccgagaagtccgagggtgctgttattgtggacttcaccaagcacggtgccaagaagctgggcaaggctattattgtccgcaaggatggcactcctctctacctgactcgcgacatcggtgccatcactgagcgtgataacgagtaccactttgacaagatgatctacgttgttgccgctcagcaggatctccacttggctcagctcttcaaggtcactgaacttatgggccacaaggacctggcctcccgttgccagcacattaacttcggtatggtccgtggtatgagcacccgtaagggtaccgtcaaattcttggatgacatcctgcgcgatgtaggtgacaagatgcacgaggtcatgaagaagaatgaagtcaagtatgcgcaggtcgaggatcctgtgaagactgccgatattctgggtatcacctccgtcatggtgcaagacatgactggcaagcggtatgtacaaagtgtttttctttcccgcctactcccgtatatccgtttactaattgttcgttttctttcagcgttaacggctacgagttcaacttggatgccatgacatccttcgagggtgacaccggcccatacctgcaatacgctcatgctcgtctgtgctcgatgacccgcaagtccgagttggatgttaatgagctagttaacgccaactttgatcttttgaccgagcagcatgctgtcgacttgatccgcctgctggcccaatggcccgacgtactcctccagactgccaagactcttgagcccatcactgtcctcagctacctgttcaagatgacacacatgttgagctccagctacgatgtgctcaaggtgatcggtagcgagccagatgtcaagcaggcgcgtatggcgttgtatgcctcagcccgccaagttctgaacaacggcatgcgtgttcttggtctcagccctgttcagcggttcgtctttcccacccttattgaagaagcaatcactgacttatctgttctagtatgtaaattcggcttattcggtcgattttgctcacttttctgtgtggcgttttactcagtatttctaagactgttgtctctggtataccttgattttaatttagttgcattgggcgccaagagcgggacgaataaaaatggcatcatgcctctgcttttaccaatatcattctcagatttcccctttcttctcttctcttctttctttgcttttccgatgccgtatcatcaagaagaaatgggggcgacccccgacggggtcggggttgggtctgaaacccgtctccatattataccacgcactcctacatggcagacacgctattgtttgtgaatttcatctgggctatgattcttccaagcccattgtccattagaggacgggtctccctgatcggggactatcgagatcttatgtcaggttgggcttgagttccaaggttgagccctatattcagccttaaatcggggaccaacttggacatgtaacaaggatttcgtctcgacactagacaggggcttgtaagtctatgggtttggttattcagattatgggtgtatttaaaattgtagaacttcggcccgcgaacctggacatgggttaggttagattccaattctctcgtatcggccgtgaaccgtctacattatcctgcagcacaggcgatccctcaccctgttaacgcacccagcaccctggacctggaacgcaatgacactggtcactccttgatgaaccagaccgttcaaaatttctcgtggcagggtttaacggttaccgtcaaggatcgtgaaacaaaaaggtcccgtgatttggtatcaagtggtgatacgtaacatgggttagatccttgtccataccccatatcagaactagcatattgatgctggttctacaggggagctcgttgctctaatgggcacgtcaggctgcgacaagacaacacccctcaacgtgcttgctcgacgtatcgcatcagccggtgcgaagtttgtcggggagaactctgtgaacagcgcataaaaggacttacgcaattttcagcgggtgacctcgtacggctatagagagctacttcagtggcattggctatccaatccctgcgcaaactaaccctgctgaatttatcttggatactgtcagttctgattttttttcagcttgaagaaactggagaaggaacgggtcgtggtcattcaagctgcctaggcaaactcaaacgagacgaagtcagcgaatacactctgcggaggaacatcttagaagagcctttacgaaagaaaatactccaccgggaatgacttcgactactatagctctgctgaatcaatcatttatcaagttctacggccatgccattgcttgtggaatcagtgtagctatgtctttatccatcctaggattatagccgtttatcaacgtcattgtaggctttacatgtccttcgcattgaagtcaacctcacaatcctccccaacgacggcagcagggtgacaatttctgttctttcaacgaaaagaatgtatttcaacacaaatactaagatagagcgtagaggaggggcaaggaagaacggagcaaattttcggatgatagaactttccgtcgtacgatcggccaagtcatagaatacatggtcgataagcgggtcccatacgcattctattcaacggatatgggaaacagccatgcttcgatacgtctgggctaacggaatgttggtgagtgctcgataacccaccctccgtcagcccagacgtatcgaagaacgattgttccgtataagttgaatggaacccatatagagcctgcttgattagcatggaccccacgacttggccgatcatatgacggaaagttctatcatccgaacattggcttcctgtccgcaattccagaggtgaagatcaggacaagtaaagaaaatccaaagtagaatggtagaggatggcagactagggaaacctagtaaaagagtgccaaatgtggaatcaatggaaaggaaatgaggttcaaaagtgttagagaggaatagcgaggtgaaagagaaagagatgagagaaatgctggcatttatagacacgttcacgcttctaaacttgactagttacttctgagcgatgcctgatgtattctagatgattgctatggcattgaagcactgccgttacccacacaatttgatgaacagcttcggcaaggacgcagagtgggcaggggtcgctcaatgaacttgactcttggaagaatctaattcacttgtgtcatgagtgtcaaatcagaaaataaaaaacaagcatagaaagaacatgatctcaagagttcatttcaacgcgtttgtcaaatgctagcaaacgggcaaattggtgtgacactattggtctcaagctttctcattggatatttctcattagacttccctacctctgtacgtacccgttactttcctgtcacatacagcaggagccttcttggcttggatgatgtggatattcctccttgtggcagctggatccctagtggtcctcataacatcgatattcccaacctttgtaatccccttggcacctgtcacatccaaatagcctttggagtgtcggagggtttatggtcatgcagaagtttccgttttggaaatatgtgttttactgcatcgattaccaggtatcctgatgcacttcttccagaagcttattttgttgtcaggataatcactcattcgcttgggatctgaaataggtttatgtactccatggtatgatggtcaatgagctttctgagcgaattacttgtggtgccgattgtcgatgtatacggtttactaacctagaggatcagtgtcttatttggggcactgaagtgatataatcgtatgatttaggaggccgaacaaatcgagcagccttggagatactctgtgtttgactacgctatgggtactgtcaatatcaattagtttgagtggacgcaattgatagaagatggatttgcttccacctggacaaggttcggaaacttcatccggaatggcagccaccaatctcccgagaacctaaagaggtccccaatcgagcaagctgttgtatattccgtagcaccttgatagtacgccgggcttgaagtatagccacggggacacttgactcacatggcagctggctttcgtatcacatcagataatgctgcttacatcgcgtgccgaagcctaagtcgtcatgaaaaaagcctatctggagctgacgaatcatgtcatctacaacagaaaacggggtgatgcgcaacacaatatgcaagtcatgtactccgtataccgatgtactactatgtacaagaaccttctataatgtttctgaagccgcgatagaagtctcgcgaaccgacaaaggaatagagttagactgagactgatttcccctcatcttcatcgtcgaagcaccgtttatcagtaatcatgaaagagcggtgaagatttcgacttcggggagctgatgccatctcgcagaacgaagcaagggggtggctcccttgaccatgtttgagttcccctaggtgagtcaatgaatcactggcggcagatgtcaacgtgatcacaccatgaagtgatatgcgaggaaagcttgttcgctgtttttccatgtccaagtattcagatatttcttgttgcgcacagcatgttcttagtactccaggtcccgatgcgagggtctatattggtgaagacaaaactggagccgcatggagatcctgagttatatctggagcggagcccttttcctggtttgatctttcagccgcttaagctgaagatatccactccggcctaagaggattttgatcagcccggaatacatgactagggtccaggatatattggatgctatcggctacgtatagtttaaattggttgttgtgagctctaaccttgtagtgttttcattcccacacgtgcggagtaaacattcctcaaccctcttaatctaagatgcaagggtgaatccgtaagggcaatgatagaccgtccgtgctgcatgtcataccgatctggccagttctgcctagtgagagaaggtttcggccaattatttcatcactgggtcgatatagtgcaccatgtatagagtacttcaaaactttagtccatatcgttgaaccgatagcagatttccatgggtttcccaccagtgtgcgtcatgaataagaagtatgcaggcggagaagagccaacgtccaaagatatcctgccacatggaggggctctgactacatactaatgccatgcagcgctcgtccctcttgtgcttgacatctgtggtttctatggtagaagtaaattgagtcattgcacggtggcgatggtatcaggacacatacaggtgtctgcctacagtctacctaacaagagagaatatggagtagccgtagttacctagtggtgagccggcttgcagtgtcatccccaccgacatttccccgtgtaccggatacattgtcattgtatttgaggcctgcattgaccaatgcacagaaaaggaaatcaaacaacaacaatcggagcgaaggagaatctagattttccgagaaccgagccatagccgacaggaacaggatccttttggattgacatggaaaacccttcacggcggaggcgatcattgggccgcaacgccggttgggcgttggatgtgggatgcaattagggagaaataggaatgaggaatgcgacacacgaaaatgcagaacacgggatgggaaaagaaaagggaaggaaggaaataaagtaaataaagtaaataaagataagaaaagtcaagggacaggtcaaccatggatccccagcagtcaaaccaaggatttcccctccagcgggtcccgagcttaaaagcacaaacaataaagaattagaatccatggatcggaaacaacatattctatttaagtattgtacaagatacaatatacaatatatacaatatagtaattattctaattattctctgctccaaatacatgtaaatagataaatacaaatgcaaatataatataaaacactgatgacgctatcccccactttcttcttttttttcttttgtgttgggtaccgagagcctcttcatgaaactttttttttcttttttttttttctaatcctgtgtggtcctgtacctgtaccttcgggttattcctcttcctgctcgttctctttatggtctctatactcctctgagtcctctccttttctaattatctttccctctctccgtccttctttccccttgagatctcaatcaaatcacccctcacttcgttgttatttcatcgctgcccatcgactccactctccccactgcgttctaagaccgtcaggcagaggatcctaaattctcaacccaacctctgcagctgcagttccttcaaccactcatcggctgccagagaggtcattttctattttcctccttcttcctttgacccaacgcgtccgcccaactcttagccttacatcccacttcgatggagacgttgcgatttgaaaagtaccatcttgctccctccgcttgacagaacccgtcgcccgtcgcctgccatcgcccgctgcgatcggcaggtccgcttacttgtttgagtggcccacttgggttgggcactggggagaagagaaagggaagaaaaaacggatccatttggtcagatctacggggtcgagagggggggaagaacaatatacattctgactcatcgtcaaaggagcagtggcttgctgtaagttgaatatcgctggagccctgtgggagccacccacgtcgcccttgtcggaaacgggaccaaccctgtttttttattttttttttttcgctagacacccgatcgccttgcagcccacataatggccggtaacggcccccggcctgcctgcgtcgaagattacgacgaagaacaacaacacaccctacccgacaccagactttcggccattattgctgccaatacagctgccaaattatcctccaggttggaaagattccaggagccgctgatcgacggtgccagtgactcaggttattctagtcgcaccgccgctacggttaatagcacccaatctgcgccgtcgggcggaaaaagccccccgatccctcttaagctggacacttccaagcgtaacgacctcgccaggaaaagttcaaccagagaacgcaaggacaaagaacgatctcgacccccgcgcgaagagatgatggttggtgcctatccgggcgctgcccatcacgctcacgtgccccggtcgtcgtccaagtctcgtcgacgagaatctgcccatatccaatatcacgacaactattacgactacggtactcagtaccatcaatcaaccccgattgaccaccgacagaacgactactcctactacgcccagccacgcccacccatcccagaatactcatcgtccccgcacaatcctcgttatgcccccggcgccatagagaacattcatgtcagtcaccctggtcgacccagccgctccaattcgtatcacacctataattccaacggacgacccatgagtttccacggtatgccacatggaatgggttctggaatggcatctccgatgtactctcagcacggatacgatcatggccctccaccagccagctcggcatacatgcaaccatactcgtcatctccatacacgcaatcttcttactatgccccatcggcctcggactacctcccatcggagtatccacgagagaggtccctgtcccgggaaccatcacgccgtcggtcctcatcgatctatactgcccccaacccacccatggactctggggcgtattcgccatggtttgatgaagatccacccacggaccactattcctcgcgagatgttgtccgtgaccgtcctcccccaagacaacaggaacaggatgaagactactatcggatgccaccgccaggagctaagcccaagcccaggccacagatccaccaggcgaagcgaccagagcggccagacctaccgcggaagatgcatacctcttcgggtattgtcccatctcaacgtctcccatccaggggcatagatagagaacgaggcatcgacagggacagaggcatcgacagggacagaggcatcgacagggacagaggcatcgacagggacagaggcattgacagagagcgaggcatcgagagagagcgaggcatcgacagagagcgaggcatcgacagagagcgaggcatcgacagagagcgaggcatcgacagagagcgaggcatcgacagagatttggacatgtcggaacttgcagctgccttaccggtggttcaagaccgcgcccgtcgtcgagtttcaagggacgccccgttgccagatagagcccgtagcctacgagatcaccgacgatccgtgtcctaccaggatgatcgacggtctgctcaggtggccgtggccagctctcggcgacggaagccaaccgagtactactacgatgccccatccagcgccgccggtgatctcgaagatcgcgagcgtgaagccgagaactatcaggcagcccgatccggccgaacctcagcgcccgcattacctctctccgcggagtccttgctccctaccaaagcgtctcaccgcaacgggagcgagagcggcagccagaacagtcggtcgagcggcagccgcggcagtgccacggcctcacagaaggaggatgacaagaacatgaccctcacgttgaacggattccaaattggatttgcacctgaagcagtcgctggcaaatctattaacattcgtgctggggagactggggctgtccgattgaacatcggtggcccgcggccatccaagcagcgtgtgaacggtaccagctctgattatgcgggtagctccagccgtcgggaacttgaagatgtggtgaggcgtccgcgggatgataggcggtcggaacgacctagtcgtcgagacagccagtcgacctacgggactactcgctaccattgattttttacccctgttagatgtgtcattttctgtgtttcttttcttctatcatggtcagatattattttttgttgtgattccatcttgtgtctacataaccatgtggctggccttgttcatttttcaaaagtttcgattgctttgcgttttttttttttctcttcttctttgggatcgggtgcttgtgcaacaaaaaaacaacggggattacctaacgcgaggctctgttgggcaacttggggaacaggctggactttgtcatgaggtccagagttttctgttgcccaatggtctcgctaaaatgggaggacttttgtgtgatttcatttgcaactgctggctcgatttgctttctttatttgtgtgcttgggcaaaatggtcgggcacaaaccccatgatgatgtgtttattatggcgatatgattgtacgattctgatgacctgcaatgacaagtctgatgtgctttactttccgatgtcttctttttgtcagcgtttcttgtatagcctttcttgttgggcccgtgtctttctcctggttaccttgttcgcgactccgagtggcggagagagattatacccatgtctttttacttgtcatgtctcaacaggtcatctttttctttggccatatctatgattttatgtgtcttggtatttggtatttggtcccgctgggagtctcgtagttctcttcttgggctttgtattcattcggttgatttctgcagtgttgctgatcttccgtgttctatcgtccatcggtcttgatatattttcctgcgtttgcttcttagttggttttgataccccgcaagctgtctgggcgtgatcacagctttcgactgtgtatgtctctttcggaggattccagcgggtggcatttgtcgacttgatataattgatccattattaaatccgttttctagcaaagggcatgtttcagatttaaatagaagtcaattgcgatcgactctttttatagatcgacccacgggtggcccaactctacccgtacacggacccgtggacgccagtcagtgtgggggatgatgtaatcaggttgcccgtgacaaccattgtaaacaccagtcccagcctcttctctccaacctcctcaatttcatgccgaaagtcaagctgaatcatacatttgggttgatatttcccaatcttcttatcttaacatcctacgatctagacactgtgcttcgcttttgcccacattctgcacccgcattctatacccacattccaggtgtcagagatctctacctacatctggtgttgatcacttgcctcaatgtatgttcatgtacctcataattcaatcccaaggatgccaaagtactaacgatccgatagtgagtccagtcttgagccgggtgctcttggccactctaatactccaccatgcctccattttggccgaccggaccctccgccgacattccaggaggaaccgttgacggactctatgtccgggatgtcagcagcgagaacatttctaataccttatcttcggtcgaccctaatccccataagctcctcccacgagactcagacgactcggattccacgccaaaatatggcgcaggcacggtcgacccgcacagcatcaagatgcaaggcctgatggccttgtttgcccttatcggactggcatttgtcataggaggaatctggttcttcttctgggctaagaacggcggatttgtctggcgcaagggcgactgggatgactacaagtccaccgttctgcgacgaaagggacccgacggaaagactctcagtaatgccacagcgagtaccaatctcggtggcggaagtgttgtcggcaagggctacaccgacgacggatactcgtttacagaaggatcatacgacgacacagcgacaactgtcacggaggagaagtcacggcgcaagaagttcagagagaccgctaaagagaagcttctccggcgcaacaagcacgagcagtgggaaggtgcagatgatgccgacgtacgcgcctaccgagcagaaaagcccgctcgcattggtggcatgaaccgcgaagccgacggaacctacaatggcagcgactacgacacctccgccccgcctacccactaccaacagagcgaaatgagccatgctcatgacttcgcttacgagcagccacgacgtcagcaccgtgatccctccggcttctcgttcacccaaggcagtgaggatgttatcagccaagttaccgatcagcctcgtatccgcgacccatcaacccgccgccacaaccgccgtcgcgaacgacgcagtgagcttgccctacccgccccaccttccgcaccttcatctcgtactagcagccctcgcaagcaccgtgagcgccgctctgtgccccacggtcacttcaccgagcccctggatttctcatctgcaggatcccgttccgaatatcaatactccaacgtggacaccgaggattcaggtaccaagagctacaagcatccaattcctggtttgacgaagggataccgccgcgatggacggagccgtcgtcgtgacagtctgagtgatagtgagggcgagacacagtactcatgaattacgactgcagatcgggctagggtttgatgtacgagataccctacttgatgtatgggatttgattttgaacgttcaacaattattgggttatggaaatagcgtgctttttacggcaaatgccgatcgacttatggatatggatatgggaaattgctttggtcatgtacataatgaagagaatcacgatgcaaatggataatatgtctgcactgtagtaggtgtagatatttcatttgttgctagccacctaggcatgtttaaacggtcgcttccgagttgtccgacatacactttagctctgcaccatgtacttcctttaaaccacaacctgaggttgggatacacacatacatcgtttcttgtgcatattcaactaccacccgtcccaaattatcgtcaagccaaaaacccctcgttgttgacgacatggcttcctgtacgtcatcaacctcccaaatccacaacatcctaatccccacaacagcaccccaagaccgccgaccacttatcatctccggtccctcaggcgcaggcaaaggaaccctgatccaaaaactcatcgacacacacccccacacattcgaactaacagtctcccacacaacgcggcaaccacgccccggtgaaaaagacggtatatcctaccacttcgtctcggtcgagacatacaacactctcaagcacaacggggatctaatagaagacgccatgtacaccggtgccttctacggcacgagtaaagcagcactcgcggaaatactcgacaaaggtctcattccgattcttgatatcgagatgactggcgtgcagcaggtgaaaacaagcgggtttgatgcccgctatgtttttgttaaaccgcgggatcttggtgtgctggaggagaggcttaggggccgggggacggagagtgagagggatattcgggctagacttgatcgcgcgaggagggagcttgagtttgcggagactgcgggtgtttttcagaggattattgttaatgatgatctcgggagggcttatgctgagcttgagggttttgtttttgggttgggctaggtagtggtgaggctcattggcagtgttcacctattttcgatttagaagttattattggaatgggaagactctctccaggctacaagaatgcctcaccaactagggaggtaatcagccattgaggctacatttgggttcatagtcagaggtgtagtccgccggcgaagattcggtgtccggggtaataggttgcagctgcgccaccgggtcaatttaatacttggatatggtctgtaatatttctgaacgtctgttgtgattgtactctacctgcgctagttatgcgtcctgtctatgacactcattttcaaaaatgaaataagacgctcaggttgttgatggtgtgatttacgttttcggcagttatgatattcagcgtggtccgtagtacacctgcatatcattttcttcatcacgttcctgtcgaggtataagccgcatttcccgcatttttcggatcagatagcgcttagctgacaggtactttcctgataggctttgccacgttggcagtgtcacgggttgattcagggggcggcgcaggtactccataccagttggttggttatgtatttccgggagggtactaaatcaggaaggatggcacggatgactcggtcaaagcatcatattcgttctatccatgactcgcttttggtggcttcgtcggtcttgtatgtatagtccagaaaagtgcctattagcgctgtggatgttgcttttggagaaagaacacctgaggaagtggcgataaccgttgcagggtttccgatgctgtagatctcgatgctcgagcacccctccaaccgtcaagttagagcgaataagatactcggaaggcagacttcacttctagttctggcataaccatctgccgtggacggcggctacatagtgagaccgtgatgagcctcgatcatagtacatattgatataggtcaagtcacctgggataaacgattccatacgatgcctggccaagatgccattgctaatggtttcacagtaaggagtacccccgtcatattccacaacggagattatagaccaacacattcgaatattgctaagcaaggttgaacagccctggaggaaagaatgctattgataaacccgataatttctcaagagaagagaataggagagctttgtcctcgaagctacaccacatctgggggttgtaaaaggcgcagttactgacgctttgatgtccaaatcgaaacctccaatgacccttactccgtaatccacctgcattgcattagcgcctgcgcttcaatgtattattggctaccctgaatgcaatggtaaattgtgagccaaagcattagaggtatatcagccacaataagttaagcccctcattgacaggtctctcattggattctacttccactcagcgatcatgtgctgcttgccaaagcctctcccgcgagtcagcgcttgagaacaaaccaacttgatccatatcatacgcgccatgcatatactatctctcttaagatattggtgatgtaaacggtccgagccgcatggtactggtactggaggggtgtagtagatgagcgatatagaaaccccaaggcttttatatttatctgcctgatcttcctcgatttctaatttcttcctcttgtatgtaaaagtcatggcttcgaactgggtacttcatcatgagagcaaccgatgggttcggcccatctacaaccattctggtgtgcatcactggctgcatgatgaccgattgcagtaactgaccgtaacaaaaggagaatttctctacgaatgggactgcatgggtggcgagttaactcctgccatagcgggtcaagattcaaggttagtcttccattcttcttgtgtgagaagtccggggaagtaatccgtttaataaaagcgtcgcgctatgccaacgaagcacctccgagtccgcgtttcccacactcaaagatgcatacggacatcagctcccattcccccccgggctagaccctcatgcaagtcgcctaaatcgtgtacatcagcaggacccgctcgattacggccaagcatataccaacgatcatttcaatccccggactccaccgaccggataccagcagcttatcaatcaccaagtggataatggtatatacccaggtgcaggcacagtgacagatgacaaggcaagcagtccgccagaatggagcccgaatatgcagtacaaggtagccagagacacaaccggtcgcagaacagggtctgcaagcatatccgaccgtagcgatgtcactagctcgtcaagaagtgatgtatccattcccgaaatccatatcgaggatctgcagggattgagtctcggggatcatccagcctcgcatatggtgctgccctatgaggccagcagtcatagtcactgcaatgattccattcccggggatgtccaacgaaaaaggcatgacagaaaggtggtaagtagttagttttccttcctgtttcgactgattggctaattttgacatagcaaaagtcctcggaacctgcatacgtgatccccggcagtagcagcgaacatgacacacttgatcctcgtaagcaacagcctaggcccgctttatgcatatccggaaaaagaaactgacgatgattcacacgcatcaggctacaagaggcagagcgatcctcggagatttttccgagttggcagggtttgttcacctcacatgcatgtcagttgaaggccctgctgataattgattgcgatcatacaggtcttttcgatgctctggcatgagaatgcaggctggcatggaactatcgtcagcgagaagcttccctcatcgtcaagcccattcacacggggcaagtatcaagaacccatatacagtagcatccgacgcatggtagtggtcaaagagcagaagggctgctgctggtgtgtgtacgtggaaagatttgcatccagtgtcagctgcatttgtatcatactaatccatcattttagacccatcactacctatagtggccaaggcgtggcgaaagccggggttgaccgcagcaaacatgccgtcattcacatgcgaggcgatagacctcgaactgtgaaatccgaaccccggatggccaaagagccactcgaggttgatcctgccaggcctgatcagaagctagattgtatgtcccgagtgaactttggcaaagtttataccgtcgagcacaatgtgaaagttcttcccgtgggcaagatcacggaagcatctcgggcgagattcctagaatacgctcagggtgagtttatcaactaggaatagagcgcgagcatagaatttatccacaggaaagatgcttctatgtcggtctacattgcctgtggggcgatgcatgtcgacaattcaacatccagacttcctgtttgttattattatttgtatttgttttgttcaggggagcgatacgggaattatatctaacgtctgcggttatttgattttgaatagcgagttttatcatgaatggttcttcgaatttgatgacatctgtatttgatcttgaagatgggctttgcttgcaataagtcaacggtttagaacaacatgagaatatagagtcgggagatgtctgtatcatagcttggaatatgtctacctgggaggccctttatgctcactagtcaaggactttccactctgttctggccattcatgaaagattggtgtttaggcttaaatcgatctatatcaactaccgagatatattttcggctgggggtaggatatgtcacaaaaaaacacctgtctacatatccccaaataagattacagtgcggatatgtaccggacttatcatgcatcctttagattagcaaagcctccaagactcagagattctcctcgatcatttatagttgttccacggagctccgcctgaggcagcaagattatgtcatacataaaatcttccaattcaccgcccgcaataaactcaccgcccgacaagatttccgaaaaaagtttcaacttctgcagattcgatcaaggaaatatctaacacaatggcaatgaaacgcaagttagacgcaaatgatgttccatccccggaggctgctggggtggaggatcaggaattggactttgaagccctcaacctcgatcctcgattgcgccaggctctgatcaaggaaaagttcaccaaacccactcttgtacagtccaaggcgattccgcttgctctggaaggaaaagatattcttggtgagacgagcctcttgaatcgatgaatcaaaaagcagagctgacagaaatagcccgtgcgaaaactggctctggcaagaccgccgcctatgtccttccaatcctgcaagccatcctccagcagaagactgttcgtttcctcttcccccttctatatatatgtacttggtatggaaatcaatctaacactgtacaaataggccgatccctcctcaaaagccacaaccgctcttattcttgtccccactcgcgaacttgcagaacaggtccagaaagtgatcacatctttcgcttgtttctgcggaaaggacatccggtcagtcaacttaacacagaaggtttcggatgaagttcagcgctcgatgctggccgatttcccggatatcgttgtgtcgacacctacccgggtttacagcaatgtcaacaactccgctttgtcgctcgataaagtcactcatttggtcatcgatgaggcagacttggttttgtcatacggatatgacgaggaaatcaatgctctcgccaaggccatcccgcgaggcgcgcagacatttttgatgagtgctactctcacttcggaggtagatacattgaaagatttgtactgtcggaaccctgtgattctcaagctagaggagaaggaagagaagggtgctggtgtcagccagtttgttgtccggtaagacaatatcctactgccgttattatagcagttgctaactcaactccacagatgcgcggaagacgagaaattccttctcacgtatgtcattttcaaactgcagctgatcaaaggaaaggtcatcattttcgtagccgatgtggaccgatgctaccgtgtgaagctcttccttgaacagttcggtctcaagagctgtgtcctgaactcagaacttcccattaattcgcgaatccacgttgtcgaagaattcaataagggcgtatacgacatcattgtcgcagccgacgagcaagcagtattgggagtgcccaagtcgaagaagtcgcgcgaagctaaggaggaaactgaagaggaagcaaaggaggagatgggaagcagcgaagatgaagaggcagttgatgaaagtggaaaggaaaagaagccggaatccaagaagcgccgcaagatgaccagcaaggaaaaggactacagcattgctcgcggcatcgatttccaaaatgtcgcctgcgttctcaacttcgacctccccaccagctccaaatcctacacccaccgcatcggacgtaccggccgcgccggcaaagcaggaatggctctctccttcgttatccccaccgagcaatacggcaagcaccgccccacctcaatccccagcacaaagcatgacgaagccctgctcgccaagatcatcaagcggcaagccaagctcggccacgaagtcaagccctaccacttcgagatgtcgcaagtcgatgccttccgctaccgtatgacagatgccctgcgttccgtgaccagacttgcagtgcaagaagcacgaggacgtgaaatccgccaggaactgatcaagagcgaaaagctcaagcgccatttcgaggaaaaccccgaagaattgcggcagctacgccacgacggcgagctgcgccctgcgcgtgtccaggcgcatctcaagcatgtgcctgattacctgatgcctgctaagggacgcaagggtctctcgaaggatgttgggttcgttgggttctcaaagacgaagcagaatcgcatccgcaaggcaagagatcgcaatcgtgcgcgtgggaaggctggtgggaaggttgatcccctgaagacgtttaatcgttctaaaaaatagttgcatagttttaaaatctgcgggcgttttgtccggataccattgtatagtcagacatgaataaaatagtctcaatttgcgctcctgattgcatgcgtaggatgctttctttttcgcttcggtgatatacattgtacatagatcattgtgcatacagtagacttttataaataaaccaataattcctgcccatccagcgatctgattgtttcaggttcaacgtctttcaaccctgaaccgagctcgatttcgagccatttcttccccctccttatctgccgaatatgctttagcacatcacgcgcattttgaaggtgatatgcatggacagaagagttcggcaagcctgtttgcggcgtggggacttcatgagacggcacatgagacgagtcgtgggactccgtcaaatccagaaagccggggccgatgccaagccattcgacatctctccaagatctgttccactctgggccaacggtatcagggctctgggggaccccatccgggtctttcccaacccattttaaagctggtagccattcgccgcagccctcaaggtccaaccatttcaggcagtacgtcgaacgggatagctgacggagaatactcgcagcttcggcccaattgttgtcaagggcgtctggggccaagaagcgggccactgagctgcgaatccgagtagtggcagcgcttggatttcggcacggtataggccaatgggcaagcgagagatgagtcagggttggcaaatgtgctaatagattgagaagagcagtccagcttgcagcactaggtgtcgggtgtgctagagataaggcacggagttgggggaagcgtagagtctgggaaatggccttgggaatggacggagttgaaagacgatcaaccatagcttcctctcggccgttataaacatcttcatcccatgaagctggaataatctcctctgtttcatgacctgagactcccacgactggagcctgcgagatggtcacctcgtttgtgagctgtttcaaagttatccagttccccagagcatttcccagatccaatcgcacgattttgaaatccccgtcaatagctcccgactcattaaaccctgggacctccttgccaatttgatcctggtcatgtcgggtcaaaaagagtggcttcaggcccttcatgtaccctctcagtggcgggcctcttgcgtacacagcaacataactcagcagcagttccttaatatgatttggaagatgggccagaaaagggccatcatattcaagatgccaacaccagttcaaagccattgttttcagcaccagatgtaccaggctccgatggtctgggaacagcggccccgggaggcgggccaaccggtgtatttcctcttctgaagattccggcatccgatggtgcgatccttgatctcccgccggatttgtatttccagcgagccaactcgcaggcggcggaggtccaacagttggtcgagttgggcgaaccccgaataccgtgcgacgaggaccggggcgaggtcgcggtggcgcggttgcagggagctcgagtacatcccgaagagacggatgaactgagcggggagccacaaacgagcgccgagcacgttgcgagcttggaggatcatcggatgaagcactaggcgtctgtgtacgtcggaggtgactgattaagtcgttgactgacgtcgctgacgcggagccctgtaccccagacccgccatcatgacgagacccagataatgcaaggctgtgatgtgctaagttggctggctttgcgtgaaaccgctggtgctttttgggcatctgtggtcgagctgcgggtttgacgaagtcaagtgtctccgggaagctttcccgcttttatcgcttatcgcccccacatttgatgggctgacatttgcggctcaaaaatatagaaaacaaaaacaaagattggcagaatgactcactgttgctcataataaaatctatacaatgttatacaatctatacacacgggctcagatatcccgaacccaagaatcgtccttcatatggccctcacgcttgggaccctcttcgagccaggtatccaccaagccctccttcgggtcctcgtcgggcagtccgcgagatcgacgaacgtccaagacaaggttcctgatcttaaaggtcacctctttgcgcagctcgacagcttctttgtcgttcaacagttcatcactcagcacccctaggggcagatcccgggaatcagggtatttcttctcgaccttctctttcaacttttgccaccgagatctcacttctccgaatacagcatccgagtccaccttggagccaaaggtaacgctgacatgtttgccaggccgaggaaggaatcgtgggaattcccgactctcgtgcataacatcgtcgaagccttcaatccacatcggaacaacatccggacactctttcggctctaagatgagccgtgcgattccccacttgaaatagcgcatggtctttcgtggcgactggtgaatcttgccttcggggaagatatggacccacgaatttgagttgcaggcgtatgcggtaggtgccatgtgtgagtccttgccatcggtagtgtaagcgactgggaggtccgagaatggatcgacacagacattgtgccggctccagtgctgaagttcgggtaaagcgcggtggtggtcaacggggaagggacccttcgataacaagcgaatagcctctgtgacagcgggttgagtcaagccaccgaatgcggaatgggcagaacggtgagtaggcagaaccttgcccatggtgaagaagagtgacagtggtcttatctccagtcagtaaaaccattcattgaagcattcgggtaaacatgtagataccttgtctgataacaaatatcgtagcttccaaaagaccaccgcttattccaaaaccgtggaggcaaaatgccccatactaatgggtcatccattctggtattccggcgcaatgtcagccatcttcacttttgcagtatgggttatctcgatccgaggctagtagagggacgtacacgctgatatgattggatactattttcagataaatcaattagcaactgcactggcttaatgcactttccaagattgttgtgttccggcatacctgtaatcaatcctcgcttccgttgcgaaacgtcatgtcgagaatctaacagctccgtgaatgcttccttcccgtgacattcggcatgacagaaaacagaaaggaagccgcgacatagacccgctactccccacattgttgtgttggataaagccctccatgggagggatggggactccgccgttgcgctcgagtccatgatggatggtgttgaactgttatacacaatccatgaacaagaagaggctttgcacaagctactaggagcttggaaagtgataagttctccgaagagcagatgtaattgtctcaagtgtacttagtagtttaaaaaaaatatcgcgttcctggaaatcgacagattcccgaaatcacatgattttggttggggtaaccattcagtaaagcattagaggccagcattaccatttttcgataatatgactggttgaaatttaagataaacaactaagctgactttccaagtcccgagaattttaacttttcctatatcaactgtctcaacgagtaaatgggctattccatcagtaaattttgtatacattcagtgcacggaccaagtacactcccgaactccgggcacgattttctcccggctacaccctgacaacaccactaaccaacgatgttcaaatcaacccaagcactatttggcggtctgctctggtgcgtctccggcccttagcccgcagcttcagtcattggaacccaagctaacattcttcccgaataataggaagaccccgtggcgtctctcctcccctcaaaaggcacgacagcgcaagcgcctgcgctccgtggacagggtcgtcgacaccgtcagcgccgcacttgagcgcaatggccagacctccaaggctgtgacccgatggtttgcagagatgccccgtgaggaggaaatgctgccgaaggacaagtacactcttttcgataagaaggagaagagctaccggaagagcattcacagtatgttctcgtgccattcttacccccttccccccacgttgacaccaaattggtattcattactatgtggatcggctgggctaaccaatttctctaccttcagagctgcccaagtggactcgtgtcagccaacgtgtcaaccctcccggtttctaaacggatttcttcaccccgcgcatgtactatacatccgaactcgactctggcgggggacttgtcggagcgaaaaacaatatatggacaaccggagttttggctttttggaatttgcagcgcggccactctgaagaggatggtggcttacaatgttccatgattaccccagcgcttagatcaggctttcaattcaaatgcattttggcaaggatattcatttgtgtttggttccggggtatactaatgatatagatgcagcgacagacatagtggtagtgaccgtatggcagcagaagtgatggatcagtgcgtttcaaatgagggtgcagttcgaaacttgcttgggttatagatagggcagaacaaaatgaatgcaagggtttggtgtgaagagtgagcggtttgagaagaatcacgagacaaggaagcttggagctcttgttctctcaaaatcatagtttgggatcaatttcccggacgcagtacgacagcacttgttgacttgagctgccacctccttgatcctgccccgatttactcggccttcgtggagggctttgtgaacacgatatccccggtggacttgttgccaatcatcgagcttctcttgccagcctgcgcctccttcataccaggcattcttctgcgcagtggacatatcaaagccttggggtggctttggcaaaagccagcagcctgtatcgacatgaccatcgggcggttcttcgaccgattcatcatacagtgtaatagtgcgaatggcgtctcgtatgccagataccctccgctgcttgttcactgcggcccgccaggagtctatacgaggagtctgtgcgcgtttccttctggatatagggtactttggtctgggactgaagactggccgaggataaggaacgttgaatcgtgggtctccccgcatccgacgtgcatcggtggaaactcttgatacgggatcatagaccaaccatgtttctctattcagccagtggttggctagcaaggcaaaatggtatggcttttgccccggggtgaattcattgaagagccataacagttttcgatccagcctctccatcatcctgacctcccaatcactcaactcatcgacagcgcttcctgttttgagctggatttgatctgcagagcatcgagtaaggtctatgtctggccttttcccttgacgacgggacaggccgggatgttttgagtcacacataaatcgccattcatcagacaatgctggtctggctttcgaattggtcccttttcctcgaaaattacttctggccggggcggaattccattggatagttttggtatatgtccgctgttcattggcaaacagaacctgatttcctatgagaagtctggaagtgaacgatgttctatcttccgagatatgcaggcgtccttcggtgcgatttcgctgcttcttgcggtgaccaggaagagaagagctggagtcagagacgtagctggccaacaactcggaccttggcgtcccgggagggccagatgaatcccttatgttgtcaaatactccatctttgggctccatctgcagtcgtgctgaccatccacagtatctgccatgattcctttgtcgatggagtgatttaggtacttttgtgtgcattgagccttttggctccgctagctcatattggaaatcttcatgttgcatgacagattggatctgacatgagatagcctgagatccctcaccacgcgaccatggtatcgatcctcggatctggtaagatttattctgtcggtatggtaatgattggacctgatggaacggcatcggtgcacgggtagctggctttgctgcattattgcgagaattgaacaagggttggtcatcagaactgccatcatttggctgcagcgggtccctgagaagttcctcgagaatcgaacgagtgataattggttgattattgaccaacgaagatttccgtggcagggttggtcccggtctgtcttcttgagcttgcggccgcacagaggccggcgctggaacagtctggggcattgagacacgttccttcaaagctccatggcatttaggccgcgaacaaggattccagatttcatcggcggtcggagaatcatcatagctcttgagccaatctggtagccaacgaaatcttttcggttcttgacggtgcttttgcttttccacgtcgccaggatcccaccaaatccaagtatagtcgtctcgagccgatttccacgtcatcaacttccaaatctgactgaagaagtcatgaattacccttttgtttctctcgtgtgtcggacgcttaacccagccataccatgtgcgtgcgtatcgggtgtttgtatttttgcctgctctcaacaccttgcttcgattgaatcgtctgatgaaccccccaaccttccaaaacacgacagcgattatgaatattccaatagttccagcaaatagctcaaagaatactacagagtcaatttccttatggactttgaccggtgtgtttggaggtcgtgcgggaagacgtgggataccgggactcagggagtgactttgtcgagtggctagtggcgccatttattgaagacctagatatactctccaagaatcagtaaagatatagagcacaaagtgtcgtcgggactgtcttctcgcaatgtgcaaatgagagatgttgtagagacgaggaagtaacaaggcatggaactttcctcccatatcgtacttggatttgttctgtatatattcgtcatagccattcctattttagatctttcttcctgtaatgaaaatgtaatggcaaattgtgaaatacatattctacaatgcttgaggttccatgtctatctacaccgagctatttgcggttcattcaagtcacgatccatcaagaacaaaaatataaacgtcgatatttactatttaaacatgagaaaccgcgtcatggttagactctttgattcacctcgatattcctagccaaatcagacgcatggattgaaccaccctagatacatccctcccaatatgtattgccgttcattgcattctcgggaagcgggtcacctatactttcatatatggaaagcatacagttattcctaggcagcataagttcattgtcgcaagggctgtgaacaagcgtcaacacagaacatcctattttgatacggggatcaaaagccaatgcagtcagcttcgccagaatccaacgtttttagatcctgctgagtcatgtttaactggttctattagctctcaaatgctatgtgaagaatagaagatcatcgacctccagttgtatatttgtgtggatgtatcaatttgggttgtctcatgctgttatggaatcatctcatgactcaacctcggttcccagctgagatgaaaccactcaagagggtatgctgttatgggtaaataatatttcaaagttgacatgggatgcaaattcaatctagtggttgctctccactgaagtggagaaggttagcgttcaaatggcaatgtctcaatagtcaggatttcttacctacgtagcttgtcctgtacttttagcaagcacctgctcctactactttcggttctaccgattaatagagaacaatagtacatagaggttgtccagatatgtgggtggtagtttgacccacattcatgcataactcgttcattgaagttcagcctcacactttcacttctttaccgtctgtctaagtcggatagaagtctagacaaatacatctgagtggcaaaatactctatcagtgacgcaacaaagctccaaattagacaaatcagactccctttcacatgccaatctcggggatcggcgatatatatctcggaagaacctaggaaatcgtcagccattccagttaggaagtgctcggttgatatgcactttccaaattaggaaagaacccgatccacagccacaccgatcccgccactccttgctgttccagccacagatcagccacgctcgagccacttacggctgatatggtggcggtgcgagctattggctttgtttctccctattttgcttttgttgggcttcagtttctgcatcttcgtatattttaccttttccagttcggatatgtttttttcgggccaacatgatgatgagtctattttgctcagtgtctcacttccccaacacttggggtcggactttattctgcatgcgcctgcgtcacaatcttctgcctgaggattggacctctaaaagcaagaatagctcattttccagtatagtatttgtcccgctgctcctgcggggcgtcgactgatctaaattattggtgagatcgtcgggacgatcgcccagctcttgaaggatatcatagggtcacggagaaatggcttaagcttttatggggtttccttagatctcaaaccagttccctggcatacacatggcatctctatcaaaagccgagtcttggctgggtcagtgaggctgatttatgcattttgtcaagtgttctatgctagtttgccagttcgcccggctgtaattccagacctctgttgtacatcggttaggcaacaacgttattagaaggtgaaaattctcacaggtcttaaaaatggtagaattcgatagcacaaaatagccttaggggttcgagttcgaggttggatatgtcggtgtttccgagtggcgaacaccatgtccacttgactccaccgccacaagttcaccgttagggtgtggcttgaattgctgattaaaggggctagacaaagcctgcaattgcggtctgatgttctcctttcatccgactaggtaggtacctccataacctacctactatgtttatgtgtacgaccacgatgaccacgagaccacgttgcccacgatgagatacttgcatactagtgatgcgccacatctaacaaaggtccagccatgacaccttacgattcaccagatgctaggaaccgagataccagacaccgacgctacgataaggacgaaaggacgaagggacgttgtaacttgtgcatcaaccctctccttgatccgtgcacggaactattgagaaggcctcaaggtaccagcccattatctcgaggtcccgtatctcaattcacaactcgtatccttgcacatgaacgtcagccgtgcatgccaagccgtttccctgtcagattgtaaggtttccgcatgcgcgaaaggactaaaccagaagctctaaattgcacagatcatggtggaacccctattgtgaggaaacccggggtcgatcctgacactagcttcagatctcctgcggtacatcttcgatctcacagatctctgacctgctccacacctgatatctcactagtacgcgtacccatcgatcagcccaaacttgaactaagttctatggagtccacactcgccccactcgattccgttccggaacgtgctgttgcaaggatcttgcagtatgccgagcagaccttttattgagctcacaaatgttttccttggctatcccaggtacctggtcatcgaccatgccgaggctaatcgtgtacttttgaatggtggcggcatttccgtggccccatcgtgaattaccacaagattgaggttatgggtccgaagtatgtgcgttactgatcttcggcgagtgccatgaggtatatgaagccctgagtacggctatttatacttcatctgattctcatattcatccatatcatcaatcattcttcctattattcttggctctcttttatccaattcttcttgaattatacttcacggttagttacagttccacgacatctccccttacttctcaatcggattgaagcggatcttcgagctttaatctttttttttttcatcaacgattcatccaacgcaattcgtctgttccaaagcactataccgtctacaaaaacgaaaatggccggccatgaattcacgctgtccttcgagactactcccccaacagccaccaagcccggttctcccttcacaatcccagtagtcattgccgtcaacccaatcgggacacccgcacaaaatgtgcagcaccttgtcgtgagcgcctccctccgtgacgaggctggcaccggacctgccgccggactgagtgggagtctcacggcaagtgtgcggagtcgaaccgataacgcaatgagcggatatgcaaaactcagcccgctcactatctcgcagccaggcaagttccggctgcgggtaatgcttagcgcggcttcgtacaacggtgttgtaacgaaggagtatgttgattcgacaataatccatgtgcacgccggtgcggctgctgcccaacggccaagtgggtcaatcctctttcttgcttttggtcgtttttgctttgttgcgggtccctcttcccttcttttcccttcttttctgactgcccctctcccgccatggcgtttttctcttcagggccaatgttcagcccctcctgctcgcctgtttcggactcttgctgacactcaaaactctagctcccactcaggtggcacgactccaacggctcacggctgaaaacttggatatctccacggcggacattgcagcatggcagcatgcatgactgaaggacatatagcattcttcctttttttttttttttttgctggggaatctcgggcgttattcatggtagcctgtggctgtacctgaacctggaaagatattttcttttaccacgtggaagaaatgcaaatccatcaactagtctcgggtgctctatatccactttttctctgatattttctttatgcatactcgctatacgttctctctattggatgattttaccaccgactatctttggtcacggaagaattttcctgactttccctctatctgttagcgcatacgctaacccaagccggaccaaatgttaatctctcttgatctaggcaaagtttgtagtttagttgcattaatccggggctttggcaaacctcgagcttgcatcccaacttcgcatcacctcatctttgggtcatgagaatcacttagaacggtgttctcgcttcgagtgaatccattactctggttatcatggttccccttgaaagacttggatgagaaaatcacccgctatatcacaacgtgtcaaactcaaaatggggcttgagatatctccaatctagacatgagcatccgctgtgtggaatcaaatagacagaatggatcccggtggcgcaagtgtttagttgaattcttacggggattaaatgagcggggcaaatacctaaatccataataccgagtctcgtgtacgaagcagccactgggttgcctgggcgaagatatatattcccatcatctctaaattacaaaaaaagaacaaaagaaactacaaggaaaaggcaacgagttagaaatctagtccacacatccggatattccattcctactctatctatacccactaggtagatcggctccatggcctatttaagtaatactcatccatgtaactactacatagtagtggggattgatccttttcgcgtgattatttagccccggcctagtgatgcaacatggtacagtcacgaaaccggtgtgcaagtggggtgtatggtggatatttgactcttgtctggtttcgaatagacggatgtctcattcaaggagacccgatgttctttaacgggtttacaggtatgttgcagttgctcttagaccaaaatatctaatatgttaaagcacttacaacgtctgtcccttgtggggccgttgctgtcatgggacactctgccgtcctcttgccacatcaggttaggatgacatcctcttagggcttacacaaaattgttcgcaactgcggtagacggctggttattcatattaccaatgaacccacagataacatgtatgaaggtgagacggagagaccgacaaatcccgcacagctcaatatggggacatcgtgatactattctcactagaatctacggctgtacaatagcctatacggacgtgtgatccttcgcggagccccactgctgactacaatatattaccagagtgcttttattccctgggtacaaagtggaatgtacggtgggattccggcgaataatgcggttgcgtcaagacatatcacaccgcatgtagtgggctatcatataaaaggtataatttaggtaaaccggcaacaaagcgatggtcatcaatcccgaatacgaattcctaccttgatcggtcactattccctactgattcctagcgcaagtctttagatcccatacccctgcaattaagcataccacaagaatccaactcgactggaataagctacaatggttggttctgggtgactcgtcgttgcattcgagaatgataatccggggtacgccgaagtctattatcttgtgaactacagtttcagatcctgatttatgaattgccacattgcctagtatccgagtcagagtttggcggtgcattctgtagagcacaagtcggagataccggagttagtggcctctgtttcggctgagtctgaattcgcttgtgcgaatattacaagagttctttgtataagcaggatgattcgagaatttcagacacgatattgttctaaggttagggcaaaaagttcttaatataggactttgtacatatgaggtggtatctgtatctcttcggtgaatatcggagcaagaggttcggtgggaaattgaacttcttctccactcctattgattctttcgcatctaccccagatttcatggatatagccactcaatcaacagttgaacagtatgggaattatctggtcgcagattttcccacccccgcctactctgaccgaagtcaatctccccagccaggatggcaaagtgttcattgtaacaggaggctactctggagttggcttccatatatgcagaattctttatcgcgtaggaggaacagtttatcttgccggtcggtctgaagaaaaggcattggaagcgattgcgaagatcaaaagcttgtgtaccccgacccccccagagggtaacataatttttctccctctatcactggatgacctgacatccatcaagcctgcagtgaagagatttgtcgccgctgaatctcgcctggatgttttattcaacaacgctggcatctccagccctcctcgggggacttcgcctcagggccacgatctgcaattcgcaactaattgtctcgggccacatctcttcactcaacttcttttaccgatactacggcacacggctggagctacacctgtcgctagtgtaagggttatctggacagcatcgattgtcgttgatgcattcgcgctcgagactgggatagaccttgcagaactattgcagaaagacgcggagaaatcacgaaattacctcaacacgaagatcggaaactggtttttggcagatgccctcgcaaaccagattggtgcagatgggatattaagtctggtgcagaacccagggaatatcaagacaaacatcatgcgccatagtcaggcttttgttccttttgttcttggaccgtttctttatgccccgaggttcggggcatatactgcaatttggtcggctttttctagggatctaaaaattgatgatgggggaaagtatatcttgccctgggggcggatacatccgtgtccaagatatgatttattgcgagctatgaaaggagaagaagaagggggaaccggcgttgcagcagcgtttgtaaagtattgtgactgtcagattgaagcgtttctttagttgctttatacttctttgaacttggagatgtttggggggtggtgagagaggagcatccattgcatggcgccaaggacataccccaaatggtagggtgcatgacaactgcttatcttgacgtacttttgctccaagtttctaaccctcttagtagtctccgatctttggagtcatcagctttattccagaatcatcgtattgaggagataccacccttgacgtgttggagcggacatgaagccaattgctcagccccagctaaaccatccttttatgtactagctttgctgacggactcaccaggtgactcactcagacattcttggcgagtttttcggttagcacggcattctagaagggcgctagaagggggtttatgctgatatgattggcgaagaaacgaagttgggggcacggagtcataaaggcttcgtatttcgcattcttgtttaatattaatcttaaccccgcggaaggacccacccgggcggaacgacgaactcactgctccgagaggaatcggacatggaagactcacgacttttggttttgagtggtgtatggtgatgtacacaccgaccagaaaggacagactgtagacgtgtccgtccgaatgtgggatgtggatagtggaaaaacaagccccgaggtgccaaaagattgtcaagcggtgaatctgcggggtccagggagcgggaagaggaggctccaaggcaggaacgactgttgattggctggtgggcgggcaatagggcactttggcccccggaaccttccaaactcaccgacaacaaacaaccaccctaaaccttactagtggagctgacaacgtgctactttcgactgtgattggtggagatgttgaggagtccgtcgccaagccctgtggcatgaagttgattggttgcgtctctactagagcggattcctctgtccgtatttgacatcatagcgactagaaccttggaaggttgtactttttgctgcattttggttggttgccctacggagtccccgatatcccaaccgggaatttacttgggtgtctgaaagaacataaataaaccccttccgcaggcttcttgacttctatttctcatcctctacttcatatcccaagtgatgcacactcaatccaacatctatcctaagagatcgctctcccaaacatcaactacctcaacctcctctcatactacccagttctctgagaagagtcattccaaactgtccaatcctctctcaattctcttccgatccaagtctcctgcaccgattgatatccccaagggccaaggcacaatgtcaatgtcacagcctcgagatatcccgcagcgcaatcgcaaaccttcatacttcccggatcaaggctacacctcagtcagcccccagatgtctgctagcatgggttcgccgaaggcgggctaccctaagcgcgcatctactcacacccggaagaacagcgatgactacaaacgttacagtggaactgtcaaccactacggtcgtcactcgaatgactggctattcggtggcttcagtgttcgcgagacgttccgtgatagcctcgataggcttcgcggccaggacaaggagagctgaatgaatgctcctgctcagcaatctcaaatacgtcccaatatatggaacctcctgtcggaactactctgtttggatcaccctcgggttcacatccgatcacatgatgacgcctactccgaccgttcagcgagaatcaatacctgatccgccatgatttgaaagctgttttgcttcaaggtcctggaaccgagcgtggtccgccctataggggtgtgactatactcggtcgttaaccaccgcgtccgctatttacgcattagcgaatcctctgtgatcatgcttcgtttttgccacgagcccctgctctcgatacgtgtggccgtgcggtacttaaattataccagttactcttggtgttctcccgggtcttgaaactttgatcattcccatcgtgttttgaattgtgttatcgaccgttttgcgatcgattctgttgtgaaatgaacagactcagccgcgtttttttttattgaaactttatcgaatgaaatttatatatcatgaagcgtggaattttacagaacagaagtaacgtagataagcacagcatcaattctagttagcgagatgatatgaggatatataaagtgtaaatgaagtcttagttgcaaggttacttcgtgtcaatcttagtaagaatcttcaagtatgcttaaagaagataatttactttggtgatatggcttttttatttttgtagttaatttgagagtttagcgaccaagatgtcgtacgtgtgtaccttttgcatatgttgtggattgaagatgttcggtaaaagtctggcttataataacaaagatggctaacctccctatcaaccagccaagtggccgagcagtaactcggccatcgcattcttccttggtctagtggtgatgatttccgcttgtcattaaaaccgataagcgcgggagaccggggttcgattccccgagggagagatttctttttttttttttcggtttagacttgtttcattaagcttacattgaacaatggatgggagcttctattacgcatagaactgacgcatttaggctgacttatgatggccatattttcagcaagaaaaacaaaaagccccaacgtttcttcaggcagaagtgcgcgatgcgagataaagtgagacactaacggcgaggctcgggcaatgtgatttgtgttttgccactggagcctagactaggccaagggtccaatgtttatttaaagcataacaatgtctgccgtttacttctaacacaacacttgccggcaaaaatcatggacttcttgtcttctctccgtagctcaatgcctaggctgttcgagggcagcgacgggccccccgagccggaagatcctctttctccgctccacgcggcagttgatgcagaagatgtggaccaggtgcgccaattggcggtcactgcggaccctgccgatctgactgtcgctctatctcgatgctgccaatctggtaaaatagccagcgcccaggctctgcttgaaaccgggcgatgtgatatcaacgcggcggtggagggagacacacttttattcttggcctcgaagaaagccgacttggccatagtcaagctcctacttcagtatggggccgatgccacaatcagatccaaaaacgggcggttcggagacaagcccccggctttcacacctctccatggcgtggcagatagtctgcatccctacgaaaagttggaagacctgccccgctacgaagaactgatgcagatactgctggatgctggatgcgaaatcaatgcacaggatgcccacggaaataccgcactactgctctctgtccaccgtgaggtagccctgattctatttctcttgcaacatggtgcggacccaaatatcgcagaagaccggggaggcacatctgcgcatttcttccaccaccccctggaccacccagagtggttcaaggccctgatggcgaatggagcccgcctggatattgtgcgaagtggagatggctacacaccgctgcatgcctatgcatctaaatgtcagctgggcgatctgtccttgttcacgccctttgtattggattggtcgatcactgacgacaatggcaacacgcttcttcatatcgccgccgcgaaacatcggcacgggagcaagaccatagcggaactgctgaatgttggcattgatccgaaccagaggaaccataaagggcaactgcctattcacatggttgaggggtctgaacaagatatccaggatgtattggacattctctgcgcaggcggtggagatctcgaggctaaagactatcgcggatgtactctgctcaccaaggccatgcgcggcaccccgcagtggaattgtcgcgagcttcttccgtatttcatcagccgcggagccaatatcaacgcgcaggatcacaaagggaacggggtactatcttatctgattgaaccatatcaattccgagatgagtacttggactttctactgtcccttggagcagatccaaaaatggtaaattacgaaggagactcgttcctgcaccatctcgcagccaattttgcgaccatcagcgaagacacggctcttttagccatgatcaaactcatgaaaatgggcgtcttcccgacccttcccaatttccgaggtcggacgcctctgcatatgctatgcagtcaatcttcagactatttattcgcggcaaccgcagaaggaggcaaatatgctatcgacttactcctagatgcgggtctcggtgccgcactaaacttgagtgatcaccagggaattcgacctatccaccttgctaccacggtttcggagcaactggtcggtaaactgctcgcgcgcggggctgatgccacagtttcaacgaaggatggccgcaatttgttgcatattgcgtcaaccgcgcgtcaaagtaactgcgttgggctggtcttggaccactgcaattccaaggagttggattcaatgctcaatacacgatcggaagatgggagaacgccgttgcatgtggcctgtcgctctggaagactggagacagtgaatcttctcctcgcatacggagcagatgtcaacatcgaggacaagcacaaccgtacccctctggatgcatgcgccgagtccattgccgaagaccagctctggcagggggctgacgaccaacagaacatgatgaatacgcgctccgcggcaggtattttggtagatgacaatcaccggccgacgcagcccacatctaatatgaaaaaaacatataaccccaaacgtctgggatggaaaggagaaatcacatctgaaagttcgacgatcggaatcggacaaatcgtacgagcaatggcgtcccacggagctttggcgcatgaaaaatcttttggcgttagtcccatgcattatgcggtagccgagggaaatgaagaaatggtcgtggaattggaccgggtgtcacgagaaatgagcattgaggtgaaggattttagccctctccagacagaattctatctgctgcgctcccagcacctcccagaccttctcgggaaacaattcagggagtatgtttctgaaaccaatgtgctaccaatgatcttgctcggccagcaacaggaggttgcacaggcggtggagaagagtgcttctgttatcgaggataaatctgccatgccagcgctcatgtcctccctcgcgagatggggattttcggagctctttggccggattgggagtacgatgtctggcaattgggtcaacggcggctataccaatttccggggccaaaagtcgaccccatatctcctggcagctggtcagagagaccttcccaacctagatgttattcaggtgatggttgagaagttcaacgcggatgttaacatcagatttgaagcgggtatggttgataaacccactgtacactaccaatcaacgatggcactggatcgacattacaagccgggtgacacgatccttcatcaactggcccaaggcatacattggtggcatgaaggagccatccagtacctcctgaaacatggagcggaccccaatgcccaaaatgatcaaggcaagacgcctctatgcaatgcagttgcacggggagagctgggtggccaccgccagctcaaaatcaccagaatcttgctggagggcggtgccgatcctaacatcactgcggcgtgtggctatacccctctggctatgtcggcgcatgacaccgagttgttccaattactgatcgaacatggagcatacccttcccaggaacaccccatggaactattcgttgcattgtatagtttcaacgaagacgctgtctccgctcttttggacatggacctagactgcaacacgactgtattatccgacgcgcagccacattggcacacccaccgtttccaaaaagttccggcaacgcacgggctcatcttgagtcctcttctctacatctcaatggtaccatttaacgaggccaactcccgcgaccaagcctgcaggatgattaaactactggttgaacgcggggccgatcccttcctgccttgccacgagaaccaaacgattctacacgagatcttcgccagcggaggaattatccaaccatggctcgacatgcccaacctcgacctcgcacgacgcgaccatgcaggaagaactctgctcctggcagcggccagctgtctgactggaaccgactcgtacgcctgcacggtctcggcgtatccattccgaggtggacgccttggcccggcgccctggaaggagggcgaccccacgcgtgcaatggccttgtatgaacgaggagcggatttgagtgcaatagattacgagggaaacaatgtactgcattatctggctgaccttgactgctccaatgatcactttgcgtcgattgaagttcgacggacattggcgttgtttgtggaaaaagccccgcagttggtgcatcggaccaacatgcatgggcagacaccctggtcgatcgccgaggagaagaatttcgtggggtttatggagattttgcagacggataatgtgcacgcggaatgatagtcgcgggtgtcattatctgaaatatgtggctactggggaaggtggtcgggttgtccaatgcaatgtgacagtaacggcccacggcgtacggagtacatcatgcatgttctgtacataatataatttcaaggttcacttctacaatatatacacttagagtgcactgacaagcgaactgcaatgttgtaagaagaatatctgccatttgcagggataccgccttccatattcagaatcaggggtcaatctaaaaatattcaaatgacgtcagcccccactcttgctagccggacctccgcccagggtggtaagcaataccaagcttccctaggtctctcctgcattttcctcgatagctgttaaagatgagccatggatcacaaatgccagggcagttggaggatgagagcaatgacctcactcagaccccgccggagagtggccctctccaaacactgagtccgagaccgccacccaacactcaatggaaggcatcgtcgcggcaagtagaggagactcttgctaagggcctgtccaatgaggacctttggatgttgatccgccgattcgacaaggttggtgtaatctctggttgtcgagaataattgctgacatgtgaccagcaaatctaccatgtgaaagcggttcgtgatactgctgctttgaacttggatctcaatcgcactgaaaatgagaagtttccgccggaaaagctgcgcatgacgcttgagaggttttatatttccgtggttgtcggagtgaccgagttcatccgccatatcactcgcttgcgatcatggaaggaaccagcgagaacgacaatgttctgcacggtatgtggattacgaacagccagattctgtacaagatattaataatttgcagggctacttcgttgcttgggccctggatctcttagttccaaccattatgggtcttgtcgtagctttaataatggttccgcctgttcggctattattattccctgggctggcaagagccgatggcccaaatggaaaaaattcaaaaggaggacaagtacaatccgaagatagcctcacgggtgcccctgaaacccacaagggtgaaaccgctgaacaagaagccaaaaatatggttgacagctttgccactgttgctatggagagtgcggcggccaaatatggtcaaacggttacagacgactcatccgacgggcctgcgctcattgaaagcttagaagctgtagaggctgcagccgaaaccccggccggcgattctcctgaagacaaaaccaagaaacccatgaaaaagaaggtatcacatgcgactgataatgtcatgcgtatgctgagcgatattactgatacgtatgagaaattcgccaagtgagtcaattctggaaggatatatgaacacatactaatggtacaacagcatcctttctccaacacctccgttccttttggttacatctagactccgacttgcgggcatctttaccctggtgtctgttattgtatcattcacatctagttattggatcatcaagataatcggcttcgcacttggactgggtttctttggagacccaatattcacctacacccttgatatgctggacagaaaagtaccaaactggagagaccagctcgatttaaataagtatgatagctctcatttctttctttattacgttgctgactcggctacaggacacttttggctggcgttcccacaaatgcacagctcactttgaccctgcttcgaattggcgaaattaattcttcgccattaccacccgccccgtcatctgatgataacgagccggtatggcccctgcgccgtaaaaagtcacaggcagcgagctctaccgacgtcagtaggcaaggatcatctgtggaccttccgtcgacggtctccaccacatcgctttcagaaaccaaggtgccaaagaagaaattcgtgttcaggctcttcaagttcttccgccgcacaattgccacggcaatcaaggggcatatcgcctttgaccgggctattgccatcgcagggtcagcacataccaagaatctgcttagcatgctgcaaaatgggcactttgcctcaacgcctctggggcccttgaagttcgatgcgaagttcgaacgtaagagaggcgcagcagtcattgactcgtcgaaggagcctcctatcttgtattttaccacatatcaatccgccgggctggatgatttacgcatagaaagtaggaagaagggatctgttctgttccagattcctgtcaccgaaatcaaagagctgaagaagacggagggactagggtggaaggggaaattgatcgttgaattgacggctgggagcaaggaggctgcagatgggttggttgttagcggtgatgagctgggccagtcttatcatcttactggtatgagatcacggaaccaactgttcaatcggttggttgctatggatgctcagttctgggaaagtcgttgatacttctcgtgcataagtgtctagctccgctgtacatactgcaggtctatttagagtttaatgacatattttatgtacttaactacgattctgacttgaaacctcaggtagaactgtggtcgtacggcatggaacgctgtcgtcaaatattttccgcctgaatggccttttttttatcacatcccgagagcttccattttttgagaattattattagagtcctataagaaaaaaagtggtccttcaaggagtaattttgaaatggtgtattcaatctgattagatgagagatttccataggattcataggaacttcggcaactgctgcccttgtaacacagccagaaactcgtctcggtctttgaaccatctcgatatagattagcacagtaggaagagttacgaaaggagaagctacacttaccttcacttgtttgaaaggaaattgacatggcaccctctttgtttttgacaatgggattcttagaactccgagccataacattcatcatgtcaagtgtcgtaccacgcatgtatggaagacgcggaagggtgagtcgggtattctcttttgagcaatcaatgaactccgacggaacagccatagtaagccacttatccggcacggactcatcccaccgtgcggcaagttgaaaagctgttcctcggcgccatagttggatatcggcgctgcgcttggtggacatttggaacccaaagagcgagttacctttcgttgatagggactggatccgccgggaatagaggagttcgtatagaggagagagggagctgaggaatgagcgggctacagggtcgtttccaaactcgatggttgtttcactggtcttcttgtcagagtgggagaatgtgacggggccttctggatggtagagctggtcaacgtgagttgagatgtagtctgtgcagtagatgcgggggaaatggatgctgaacgaggagtggtcgtatatatagtcggcgtcacggtaaatatagtacaaatctgaatatcgccatggtgcacgagttcggaatactagcacggctttgtattgcttgtgctcagtgccagtatcaaccacattgtagataagtccggagctgctgggttgtgaccaggaaaaattcggatggaaattcatctctaggacggctttttcaaaatcttccgcttcttgatgtgagtggaattgtagaccgacaccgatatttggtgctgtctcgtcgtacacataagagtgcaaggggttgtaattgccatcagtcttgtcagatcgcacctggcatgtgtcggaccactgcaagaccacttgacgggacatatttcctcggctgatctgaactgcactgagaggcataaaaagttccatcgttcgtggggccttctcagcagcagaggaagtgatcactatgcgtcggatagaccgccaggcttctctaaaagatcgttccagaatgcgcacctcgcaggatttcaccataacaggcggattcattggtttcatggttggcgtgttcagctgctcgaagatatccaccgaggtcttgaaaataacgctctcggtaaattcggttgaatcaaatggttctctttgccatacggcgtcaaaataagcctttgggatattgatgaactgtgctaggtctctatcaaactggaaggatatcgaaacgctgatattatcaaatttgaatggcacaggttctgagactctagcgccagggaagccagtcaaatatgcatttgataattgtacaaggggcgacagatcatctagtacgactaataacggttagttttataagagggtattatgagaatcgtcacttacagtctcgttcaaggcacagagtgccactttggttgcaaaggacaatctttggctcgctttcaccttcccgtgttgccagcaagagcatgtagggagcacccttggtgcgcatgcgaaaccttttgcccccgatgcaggcgttgacaaaggtgcggtagagaaccttttcctgttcgttacctgcatcctctaggtcgacagcgatccagcgcaaattatccaaaccaagatctagattaatgctgccattccaagtttcctccggctgcatgggctcccaaatgtcaaggttctgggtatgtagatgcgacggttcgggaatgtcgacggaagtatattgggaaagctcctcattaatgccctatattgaattagcgacagattgaagtaatcataccacggcaccgacttcagaaagctcaacaattgacttgcgatcctcgtcaaccaaaagagcaggagagggctcttcctccagaacgatatcgtacagaatatatgaagccttgagcagatcaagataagcttggtgactaggcgatctcgattccatggagggactcagactgccacgggcgcagacatagttatgtctgttgcaattcgccaaagtcgtgcgcgccttgataactgttagtaaatattgcacctatttgttctacacgagctcactttcaacaaccaccaagttgccacgcgcaaccaatctcttgtggctagccttataatctgcaacccgtcattgactgatgccttgaatgttttcaatgtttccgcagttggtctatgcaatttattctgcggctcaaaccgtattggccttgagatatgctcccggtgccgaacatcacgaagatgttgcatagcgggcgtcacagcctcgataatgtgaggagagccatattcatcatcagagtaggatcgagtttgctgtacgacttgctcctccgcctggtcggagttgttcgcccatatcccatcatcgagtgtcccgccgtcaatcgagccgccaaagagaagttgctcactgcgcattcgggtatgatttatgcggcccctagtaggtacaaatggcgacgtgttcaaggttaaccaggaagttggcgaggtatcatcgaggggcgactcatccgattcagttatcgacgatttggaggatgtagacgtatgtttgaccttgctgctactgcccactgagcttctgttattacccaactccaacattttggcgcgaacttcctcgattatatccatttcgcatttttcttcgttgttagctggtagctccacgatgccctggccagggctcatcggcgagacaacggagtctgtatcccgaacaggtgatgccgctgtactgagaacgatctgctcatcttctcccgtcgccagaacaattgttttctctatgcgagcaagcgagggtctagacaaattagaccatgggcctggatctgggacaatcaaagcagacttacttccctatagagctcatatattggctcagattgcaggtgtgtaccgtgatttcggatctgagatcctcaatctgagttcgttgtgtcacccacttgatcttttgccagaaaccctttccatctccagtttcgaagcccttaagccgggaaaggagctcttttagtcgctgtagggtcgcgaagcacgcaccgagggatcgttcaaacgtctgtttgcaattttcatccatcttctcaagaaatgatgccttgaaatccacattgtcaacaaaggtgcgtaaggtgccctgtaaggagcccagctcagtcgctagcttttgaaatcctgcgggggcatctttcgcaatgatctggcattggctgtataggtcccatgtcaccttggcgagggcagggatctcgataactccgagacttgaaggcatccttgacaaaaggaattcacctcgatgagactagatttttttgagagagaacggacacgaagctgtgagaggtgcggctttccgcagtcatgatccacaagactatgtaaacaaaatgtctttcaatggatacgagctgagccaggcagtaaaatataataaagcgtttcccggggacaggccgaacattgcttagccattctagtcacccatgaaagagacagcctcgaatgataacccgccaagcgttccgagctaatatgaagatcgactattcgatggctgctcccaataggtacttattccgagtcagagattggcacggcatatgctttggcaaaccgaatcaatggtatgaatgagtatcggtggggaacgcagacggcctttccaaaatgcatatttctttgacaatgcgccgctaggctctgtgtgtgctgcaaccaaacaaagaagtgcagtaaaagtggcgtcggataaccgaaagctggactgcaactatgcaaacgatctagcagccagaggattatttgattttctcccagattggtgtgttccgtcttgggtaggacatgaagttggacgcatggaagccgtccacttattccctgcagtttgctgtcaaggtagttcaaacgaaatcaaacattgcaatatgcaatcagctgcaaggatattgctttccaatgacaaaggaaatataaatataactcctccgtactctgcgagctctcagagatcgacatctgcgacccactttctgcctgaggcgccaacttttgatcgtcgcgacagctcagcccctaattttttattttcgttcctatcagacacctcatccagctctcaattgattccacaaagcatgaagtacatcggaaagtgttgatttcactaggccgagacatctacaagcttgcctaccattatagagcctcacacgatatccaattaatcaatccaccatggcgtccaccgcgtccttcaccttagacgccacgacagtcctctgtatcgtattctcactttctatgatgccaattgcgtacattttgagcaagacacttgtcccagcccacaggacacgcgatcgtgtcctcttcttctggcacgcctatgatgctctcacccacatcttcatcgaaggctccttcctctacgaatgcttcttcagctataccactgtcactgggaatcaaaacgtggagcccttcttcctcaatgaccccactcgtgtctacggtcccgcctatgggagtggacctgcgtcacgtttgtggcaggaatacgccaaggctgaccgccgctgggctggcgctgatttgactgtcgtctcgctggagttattgaccgtcttcctcggtggtccggctgcgatatacatctgctatctgctgtgccggtcgtcaaatgagaagatcagtgccagatcccggggcggtgttaaggcaacgctgtggctggtttcaacagtgctggctacggcggagttgtatggtggattcatgacctttgcaccggagtggctgacgggaagctcgcagctggctaccgaggatccggtttacctttggctgtacttgttctttttcaacaccctctgggtctttatccctctgtgggtgctgtgggaggcagcgaaggagctacgcggtgcctttgtggcggcggagtcccagaatgagaggaaatctcagtgagctcggtccgagggtgggtgttgtcggaagtctgcatgaacttacgcctgaagcctgttctcttctttttctttttcggaaatcttgatacacatcaggtacaaaatgaggccgaattgtcgccacctttaggattgtgatgaaatagaataagatagattcctattatctcccaagcattaccggctgtctattgataatagtaaagaatattcacgttggcttgttgcatggtacttaggtacctagaatccctgaggtgccattgttgtggaatggaacaaccaccattcaactcaaggttcggcgggcttatggtgcaagtgagcggctttgagatttatcacttcagtctacactctaaccatttgattttagacattcattcccgtgtgggtagagcaaatatgctccaaactacgcattgtccgaatgggcttcgacgctgaacaagcattgtatcgcggcttctctcctaatgcatatcactcaaggtgcatctgcatatatcaaaagcctctgggcctagactgccgatcaaaattttgatattgttccacaagatcagttagtactgtactctgctcgtggtattctcgtcgagagctttggtcccacatcgctctatggtactgcttcactgactgttgaggaccgcagcaaggaccctgatgactttgcacctctgactaggtctatactacgacctagggagcattgcactttcctatttctagctgtgaaccatcactatcagctgatttttgcaatatgggattgcaggtcgggcatacttcactggcccaatcaagggccgtggcttggtccgctcgaattcaaccactcgcatatagtctgtggtagctacaagcactgccttggtccttggaagctagaaggattgtatgcactcggtctatgtacggtggtgatgttggcaagtggttttctccaatgcttctaatgagacatcaagttccgttgtgattgatatagccatcagatcaggttatcgtaaataggaatggaaatattctatttggatttaaaacgaatgacccaacttgataatccatgccatatctgaaataatcatacttgttcctatacgaaagccccattgtcggatgttcaatgtgagtgcaatcaagtttgtacgtcgacgatgtaaacaatcgcaatggcgagtgactgtgttagggtcaggttgcgcaggtgactgacttgacggccattcatctacaccttccatcctccttttcctttactcctgtttatcactccaccatcactttcttttcatcactcctttccatccttttttcccctttctgtcttcaatcacaagtcagatttcaccaagatggcactcttcataccgatgagtcttgtccctctctgttttccaacccctcctaccccaaagacggaattccaaaccctaccagcagaaatcaagcttctcatcattgaccagcttgatcgtgacacctacacactgagccatctagctgcctgcaacagggagctttataacatggcgatccctgcactgtacgccaatgtgtctttgggagctgtccctcattaccggatgtggcccggtttggcatttcccgctgatcgtcgttctgtaacttcctctcttccgggaatcaatgttcgctctctcatgacaaataaacagatcgaacgctttcttataacaatcctccgcaagcctcaccttgcagaattcgtgaaatccctcgacgtgaccgacctacacgacctttgcttcgagcacaggcagagtagtactcagagaagacagcttcttcttaatcctctcgctcctcaagaccatcaaatgattatggacgccgccatgaaattacctttgtattcaacaatcagggtggcgatgcgcaaagcccttggttgcgatgtaccccggtcagatgccatggtagctgttcttctggggtacctgcctgccctaaagcacctcgaaatcgcgatggagagtgaagatccgttccgcgaaccgcaaaccacagagttgaaccttattgaacgtgttctgatcagtatcgccggtgcgcgctcggctcagaccgacgaaaatggcatttcaaatgctcttacacctacgctgtctaagctcacccacctgaaggccgaagtcgacggaaaatcgcccatggctgacattgattggctcatgatgcttcttcgaattcccacgttgacccacgtattcggcaccaaatggtccaacgcacaacggtggctgcgacctgtacctggcagttcccatcgcctcgttcaccttgaacttcgcgactgcacttttgacgccctgaatcttcgaagactgctccgacaaacccacatcttggaaaccttcatctacgaacgcgggtggacagaggcaaaagattgggtcgtgaaggctgcggacctcagccaagcgcttcagtacaggtctcacaccctgacctgtcttgaactatcattcaatcgaaccgatagaaagatccacgaagaattgtatctccatcctctcaacctatcggggctttctcatctgaagagactccggatttcggccggctaccttgtccagactgaaacaaaatcggcacactatgaaggtcgtcactggcggttacatgacgtggatggagcatacaacagaaatcttcctttgcacaagctacttccagagtcacttgaggagctacacatcattcaaattctagatgttctcgaattcatgctcttgtgtgagaagctgtgcgcaagtctccagagcagaatagttcccatgtctctggagcctcaccacttcgaatgcctgaaagagatcaaaatcgaggctccctttgagggcgaaggtgagtgtatcttttcggaactctccagagtcacaaaccaggctggagtgaagttgacaacaatcgaaaactccgccgactatgtcaagtcctggattaccggcaaatcgaaaccatcatgtgccgacaagaagattgactgggggtttgacggcgacgtccgatgggcacgtccttttattcagcgaggagtgacacactagtagctcaggggaatgatcatgatgtattggctagccatgtgatgactatttgcgtgctacgcattaggatgatatgagatataccattcgactccgaattagacggttgtacttgcccttcctaatcctcgactatcgcacctgctatatccgtattttccataataggaaggattaataggaaggagtcgctccttcctaatccattaagtaaggactatataaaactaggtcgtaagaacgcatagatagttttccctttctctctctcctctatacttagaatcctagagtaaatatactcttttcctttagattaaactagcatgttacagtgattatagaactataagcaagtaagtaagcaagtaaatagttaaaccacagcgtagccgctgagccggctgcaggccatttaagtaagcaagtaagtaactaagcctccctggggggtggggggtaggttcaaacgcctaaaggcctatatatcgtatataacctgctaggatgttttgtcaaggaatacaacggtccccttcatgggaaccccttgcccatctccgcggactttggaaaaaggggtagcaaaacgccaaggagaccttaaaggcctcggtcgaatcaagccctcttctcgtgtgtgcgtccggctgaaaaggatcaggctctaataaaagaggcacgaaggattgccgggaaacccgcttttggatgcgatgtccgaacagtcgtctctcttcctcccctcctgaaagcagtcgttgccgcggccttgcctaactgattaaaggtccaaaggcaagtcgcgccgctatcaggattgggcttggacaaccttcatgatgtagacttccctcgtcaacctgctgctccctctcgggattgcatcaacggcatctgccacggtgctgctctacccagacagtctgccctcgacactcacttcggagtgcaccgctgccttgactgtcgacgtcacagtctgtgacccgctggtgagggacctccgcctggatatcttctacccgcccgcgtcactgacgcgcatctgcaccaccggctgctcatctgcccttgagacatggcgatcgtcggtccagtccgtgtgcgggaaccagacggtcacggtcgatcttgaggttgagaccgcggctgtctatattcccggcgcgctgcagtactactttcagcatgcctgcctcaaggacgacgggggccgtttctgcagaccagtcgcggccctggcagcggtgttttcggatcccggcatcagccctttcaactacatcagcaacgtcacaggccagttgctgcccgacgactgcgatacgtgcctggccgaacggctgcggctgcgcgagggatcgccgtatgacgacggtcccatcgcggtcaggatgtcgctgtacaagagcatgacggcgagttgcggcattgcgggacgccccgtcgtaccaacgaccatcggctacttcacggcagcccccgctccgacggccgaggtgtgtgaaggctcgacctacaccatccaggcatcggacgactgctacaccatatccaggagccagggcgtcggcaccaactggctgctggccgacaacaacctggaagtcttttgcaccaacttccctgccgcgggcacctctatctgcattaccaaccagtgcaccactgtcaccgtgcccgtgaatgcgacgtgtgaggccgtggccgcggcggccaacatcaccgaggcgcagctcattgcctgaaaccaggccgtgagtggcgattgcgtgacaaattattggttgggcgaggcgtattatgttggccttagtgcttagataggtagataggagggggtgggataagaattgatcgaagaagttgtcttttgtgcttgttggtgaacagctgtgagcgattgtcgggccttcattgcttgaaattgacatttgaatctgctctattcaaagttaccggccagccgtgttgattcagtacattacctagaaaatttgattctcgtcacagaaagtcctgagggtcttgctccctctcttccacaaactcaagtgctttccacaccatgttgccctccccgtcttgtccgcccacgagatcctcaaacgccctaatgacttcgtcgtccggcctccagtcctcaccgacatgccacgtcacctttcctttcccatctcctccagcagcgggcgcctcatatctcaccccccatcggaacattatcgaaatcccctccacacccgaggaaggaggcacctcatcactcccttcatactcttcggcccgcacattagagggccgccacgtaagccaggtgaatagctcggcgtcttgaagggagggcatattttgccgttgcagagataaggcaaacgctaagagtaaagggttaacgcgctccgcaatagggtgtatacgaaacatgtcgggctggcggagatcgtatatgtccggtgcgtcgtcccagtactcgtccttctcctccgacatcagctcgtgcgtctcgtcgtcgttttcctggcccggcgggtagtgctcctctcttgtgatagcgaaacctattgggtagggatcttcccctcgtgggccggaaaagtaccagctgccgtcgggcgcatacggatggaattctatccggaggtaccgcatgcgtatccataacaaagcgtcgctcccagaggggaaaagatcgggggtaataagcgcgcaggtatccagttcctccaggcaacttcctagctcccgcagcccaagagacacagggtctacattattaaactcgttatttatagacgacgacgtaccaataaggtcaggtaactgctccgcttgatccatctcgtcccagcaatacgggtttggcctccagaaccaaagacggaccttggtaagggaggacggcaataagggcatggcttggcgcacaccccgtgcgaactcggcgcggtcgtcgcgccaaggacctgcccagacgcgggaaatgatacgtagtgccttagatgtgaagggaatggggaagtgctccccaagccaggggcagagcagccggcggagctgaggaaggcgggtagcgagatcgaggggggtgcgcatagagacgggtcgcataccaaacggtttcccggtaaacgcctcttcgggtacgatgagcaggtcggtgacgcagttgaggacaggcaggctatccacgttctggacggtgaggcggcgactatggaaggcacggtgcaagcagttgcggtcaccaccccatgcgtcgggatcagactcgattacctggttgccaatgtagatgccgggctgaagacctcgatcagcgtcgatcaaggctggctcgtctggggactgcttggctgccatgtcttcgatttcgtgcagaccgttgaaaaaggcgtgcacttgggctgaaaagtgggcgttgacggcctcgaagtcggcccccggctccctgcacgggagcggcgcgccaggcacgttgaggaggagaggcatttccgcatggagttggcccccgccaaagacaagcgggacgctcccgggctcattgtgggcgcgcatgttttggaggaaggcctggacggtcgcatctttggagggcggcgtgagtacctgaatgtgttgggacgccattgtgaggattgtctcgcaatggtcgcgattggatgattccctagacttaggtgttgggtgatagaggcaacttggaagttgctcgagcagccgcggatgaccagtaaaccaggctccccgacagcaaattaattgagattcacaagacctgttttttttaccgtcccacctcccacaccacttttcctaggcacttgcaatgctcccaagcactctttacatcaacctaccacggtatagggtaggctgttgagggtaaggggcggggtgatcgctttctgccggtttgactgcctatttggatagtagcgatactaggtaccggtgtcgcctaagatatggcgtagtaccggctgccagtgctgctggttaaaactttgatgagaaaaacaaaactagggtccttcatcaaaaaaggagctactcctagatcggaacggacatgctaccagatgatatactggtagctcaggggaatgatcatgatgtattggctagctacggcagcggggtaactagctacagtaaggtcacgtgcacccttccgtgggtaacaaggagcgttgaattccacccgagccgctaagtgtttgaattggagtccggggggaagggggtgggggatgtattgatatggggatcaaacaatgaagtgtatgagaaggttccccttccctttccccttctcacttgaatgtaatgagtacgatgtacgatgtatgtaggaattgaattgactgccttgtggcctgatatgtgcacggaccatttatggccatgatcgacatgatgtaatccatccacatggcccccgggggtagtggacctcggctttaatccaagagatcacgtttgtaacttatgagaatcttgccactgtctgtaattatcatcatttcaattcatatccgaaatacctcactcctgcgcattctgtttgaaacggatattagaggttgaatggcctgatccggctcgtaacaaatcatcaattccccagaagtggatctcgaactcgagtactcgagcaccaacagagccatggccgaatacaaaatatcctacgagtcccaactggtgtgttctaagaacccaatcgcatctatttctcacacatccgcatgtgcatccctatcaggccatactaacatactcacaatcaaggacgtataccacccctcctaccgctacgaagcccatgacccgcgcgactggcaatcagccgctgcccgtggaccagccctcccagccctaggaaatgcaaccgccggtgcagtcggcgcagccatctcgaatgtggtcgtctacccactcaatgtcatcgtcgcccgtctacagacccagaagcagaaggacaccaactcgagcgaaaaatcagaagataataagaataccgacgaaggatataccagcgtggcggacgctgctcgcaaaatatacgcgcaggaaggcatctccgggttctaccccggtctggcgcaggatacttggaagaccgtcgcggattcgttccttttcttccttgcatatagtgcccttcgccagaagaggatagtcgcacgtgtaggtgtagaacgagctgccaagagcaagaatattgttcttccgataatcgacgaacttgccgttgggatattggctggctcgtttgccaagctgttcaccacaccactgtcaaatatcgtcgcgcgcaagcagacggctgcggcgcgcaagggcgggaatgcgaagaacctgtcaaccagtgacatcgcagctcgcatccgctctgagaagggtatcctaggcttttggtctggatactcggccaccctgatactgactttgaatccgtcgctcacgttcttccttaatgaattcctcaaacggaccttcctaccacgctcgaagcgcgacaaacctcatccggctttgacattccttttggcagccctaagtaaggtcgccgcctcgtcaatcacatatccattctccctcgcgaaaaccagagctcaagtaatgagctcgatctccaagcccaagtccgagtctgcggagaagactcgggcctctgttctcgcctctctcacccccgaaatacttttcacagtcgccaccatcgcccgcacagatggtatatcaggactctacgccggtctccagggtgaagtgctaaaaggcttcttctcgcacggcttcacaatgctcgtgaaagacgccgtgtacgcgtttataatcaagagctactacctcctgctgctgctgggacatcgctatccttcgcccgacgaacttatccagcgtgcccgcgaacaggcggaggagtattctgagatcgcgcgcgaaggagcgcgtgacttagcagagaggacaagggaaggtgccgaggagctgctgaaggctggttctggtggtaacgctgttgatatgacatcaaacttcgcggacgctgctgatgctgcaaggaatgcggatagtggcatcgatgcttcttcgggtctgaaggattcttcggcgatttctgacgaactcaatgagacggctgagctggtcggcgattatgttgaagacgaagcggccgagtggcggaccctttatcattggttttgggagaaggatcgtggaccgcaccgggattgatttggcaaaaatatagtttttgatgtctacatatttcgcattcttgttacgattagtttcttgttcagtgaggtaaacaatacgaaactcaactaaacgtccacttagcagatccccatctcagctggctgaattagttacaggacctctccaagtccaagcaactcatctacctcgccccagaacacaatgaagaagacattgcatttttccacgatctcattaacgaccctataatccaaaccctaagcaccggccgtctcccgcgcccatctcacaaaaagtccgcaagggacttcatcagcagactccaagaccgcattctaggagtagtcatatgtctccctgcacaaaagtcccgcgcagaagcaggaaccgaaaccgacccctcgcttctttcctcggcccaaacttcagatgcaccagtccaaaatccaaactccaagccagtcctaaccggccacttaagcctttccagcttgaccggactagactacgcgcaccatcgcaatgcagtgataggaatctcaactgcggacgggtaccgcgggaaaggatacggcggcgaggcgattaactgggctttgcattgggcttttcagcatggtggtctgcatagggtttctaaaggcgcgttttcgttcaatcataatgctttgaggctttatcggaggcctggatttgtggatgaaggtcgtgagcgggaggctatttattatcggagggcgtggcatgatactgttggtttgtcgatgctagagcatgggtgggaggttttgaggattggggatatggtgctggatcgagctgatcgcgcttgagcgatagtgaaggtttggcttttggtatgttgttgacggtctggttgcttcattttgatcaattcaatatggaagaatttgaagggacatttcttgagatctaacttggaaggattgttatgattggatgatagctgctcaattattcccatttagtagacagtagtttgaagaccattagaccatccatcatcccaaataatactatacaagaaggattgccgtgagaccaaaccccaactacggcggtaccgcaacacgaagatgcgcatcaaccaaatcaaaccaaatccccccaaacccagactccctcgaagccctagccagcttcacaaattcctgcagccgtgccacacacgagatctgaaccgtgaacgaagtcaagcgttccagcaaatcttctccaggcccatatatctcaaacatagccatcgtcaaaggaaacaccaccggcagcgcactagattcctttacattgaccgctgatttggcaaagaacgacaattcagagaatattccatttgcgagtttccacgcggccccatcctcgactcctagcggataccgcagccggtggaggatcaataaggctgctagacggtacacgttcgcttgtgttaccattgcgaggaccgcatgttggccgtagctttcgaatagtccggaaggagtttggggccgccagcgtctgatcgtctgctctagcccatccagtcggtcgtgaagggctgtgtgtgcttcagaaccgacaggaggagcttgtatcttcaaggtattgctgcattcgcagatgtcatagaggtgagggaggagtgtcgcgcaaaggccaagatagcggtcaacgatgacgcgacgctgggggtcgagtcgtattatagggatttcacggtgcactaggcactcgaccgtgtcgatcagaatcggggacatggttatcgtgtccatgatcggggcttgcactagtctggggagccatgctttggtcgacatgagggagctccggacgatagagtgcgctgtactggagtatggcgccgtgagtacgtcgaacacgtacatggtctggcccaggaagagagcgcaagctgcgctgtagtcatttgagatttccacgcttcttagacgctgcaagcccttcgctgccttgaacatatcgggctcgctccggcggataacaggcgacttttggtaattcgacatcagccctaggaaggccaggtatccttcggtcagcaccggggcggataattgcaaaatagcataaacagtcttttgggatcccgggataaaactagatccgaatataaatggcgaatgtatggctgagaattgttccacgtccgtaacagtgcgaagcgcatctgatgttgtttggaagttgacgggggcggcgagtaatttctcaggcgatattaccacgacctcggtactgtcaggggtccaaggttcgtcatctctgggagtcgagctcgaagatgaacatggactagaggaggagtatgagagatggctgtcgttgtccttggacttggcgcgctgtcgcgacacagcagtagaaacccgcaaatccccatgttggacgtctttgggagaagtgtggtgtatcatgcgcttggaatgacgagcagtggagccaatcttcagacgattacatctcatgcatgttggactagtacctgcagcacatgtctctttctctttacttgtattgcagtgggcgcaggccttcgacatgattttagcgcgaatcgagggaaatagcaagagaccagttgtaaaatggtttggagcagttcggtcagtttccagatgtcggcgttgtatgaattcagggaggtgtcacggtaagatccgtcggtttccccgctctccccaggatatccagggctgatcggcgtatggacttcctctttgggtattgcgatcagatctcgtttagggccatgaaagatatggagaatagtaggtcagtagtatctcaccgcttcacaatgtctatgggtgataatttcaccctctgccaaaagtactggttgggttgcgcactgaatccccagccaatggaagcgcagacgcgaacgcggactgaatcacgcgatcagcacatagcttgcaaatataccaaggcctcttgatctcgccggctataaccgagctggagaagaataagccatccattgacgaaataaaaatcacattgttagccgccggttcatccataacaaggtcccgagggtgtttgcggttcgcctacactacctatgccccgaaagggcaacccttcgcatggaccggctaccccagaaggtccccggtctctccataaactccactcacgacttcggcacggtagcatggggccgagaggacaccgactcggggacaatattgacttcagcgtcaacatgcatcagtaacatccagactttctgctcggaaccagatggctttttcaacacctacgaaacgatgcaactcaatctcatcgcggtcttcgaaagatctgggccgcagtcttcactgataatgctgcttccggtggctgaagtgcgcgtcatgacagcccatcaagattcaagcctatttgaagcctagccgtgagcattgatgtcatatttcccccacatttaccaaaacagaagttggtcgcaaaccttgtgggcggattcgccaactccgtacataggggtctggaacagactaggaagtgattcgaagatgtcactcggatatgttgcatcttggctaaacgttgactttgctttgtggatactttcaggtcgtgcatatagttgagttcatgggctgaattggcaagcacagactttggatggaagaacctgggctgtgctgaaaagggaaatcaaagttgcgttgcgggtgactatcctccgcccgcgaccgtacaatgacaccgtcattgattgagcacagtatacattacatgtaactcaagccacctatgcaaactacccaaaccactaattcctacacgatacaaactacgcagaaaccaaaaaagatgactgatagcaaaagttaaattgaacatcatcgggcgaacccaagagtctaccagcaactagttacgaaggacaccaacagtcccatagttacccacgaaaagaaaagactcccaacctcaggggacatagaagaaaagcagtcctaaccaaagcaattccccaaaccccaatccaattaccgcaaaaacaaacaagtagaacccatcacaccgtagcgcattaagtaaggaaagccttcgaccgacacgcactccacacgcagcgagtgtgagtgactgagcagcaagtagctaacaacgaatctaaccaccgaatccgtaaagagtacggccttggcgcttaagagcatagacaacgtcaagcgaagtaacagtcttacgcttagcgtgctcggtgtaggtgacagcatcacggatgacggactccaagaaggacttgagcacgccgcgggtctcctcgtagatcatggcggagatacgcttgacaccgccacggcgggcgagacggcggatggcgggcttggtgattccctggatgttgtcgcgcaagatcttgcggtggcgcttggcgccgcctttgccgaggccttttccgcctttgccgcctgtttttggttgttagttttgtttgggaaggtactaggtttgatatgtggatataagtgtggcgggacgaagggcagggagtatagttgaagggtggttggaggttgtcttaagatgcagggaaggtgggatgcagtttgtgcctgaggcagtaatcacgtgtcgacaggggcatcaccatcaccggttctaatccgggaacatcaccacgacaaggatataacgacaacgagagataaaaaaaagaataatacttacgtccagacatagtttcagataagaagaaataaaagtacttaaaaagtagatgaatcgacgtctgtgtcgtcgataaacgatggggaaaaaaacgcgcttgatgggatggcgttcagagtaaagaggggagaaaataagaaaatcgctaagtggaggggggaaggcagtttaaataagaaagccgattacgcgtgatccggaaagtacgtgttttaggtaagcgagaaattgcattctgcaatccggcggtgattggcgggcggcggggaaagaaaaagagtgttaggaagggtcggtttccagcgcgtctaccaggcatcggcgagcccgcgttttcctgcggcgagcgacattgatactagtcacgtggtgataggagatacgggtggggctgccgaatcaggtatagcctaatcgggaagtatatcgaaagacccacctccagcttttaacgtggctagcattcttatcaagtgctacatagtacatactactatagtaagaatgcttcatgtttccgctatcctacaagctacaagaaaaaggaagttccagtcagtgcgcgtgcatcatgtctcgtatcatttcaaaacaacgtcgcggtgcctatataataggcagtcatgtatcactatcttcgcatcctcatatcccaatcccattccacatccacccagaaacctaggtagaccgtatcgtggaattaaggagtaacaagcggaagaaaaaaaaacaaaacacaaaaaaacgcccgaacaccatgcaataaaaacaaccgatcaaatacaatgcagcgaaatcaaaagcggagacaggcatactaaaaacttttgcgttgaaaaaggaagggccatccagagacgaacagcaaagaatcgaaagatgcctcggaaaagaaatcgtagcgtcatcatgcatagccaagcggcacgcagtaaacaaaaacaaaaacatcgcgagaatgtccgcaccaaacaaagctggacgggcgcgtcgaaaattcgggccgacgactgatggtagcaaaccgacagagaatgataacgaaacgtccgcggtttattatgcatcgcaaagacaaacgctcacatttgctgttggttgaaaccaaaagagcgggtagttgagatgaagtaatcaaagagtcaaaagaaagaatccatcaaagtgcgccgttacgcggtagggtcaaggtagtcgaaatttggtcaacggatttgtccagttccacacatggacaaccaaattcccttcacagagtcgtcaacgatgtttcaaggccggccggaatagccaggttggactctgtcagaacagtctattttactcaccctctaatgactgttggagagtgaggttcattcatgaagttgtggtggaaagagtggcgaaaccccataggggaggttgagggccgcggggaggtgcgcgggctcacagaagcccggggggcctcgacgacaggagaatcgcgaggagcaagagagcgaggagacagaggcggcgagatacaggctggggaagagacatgcttcgcggcctcgcctgcacgagcgttcgagatcgatggttgtgccttcggggtcgatccttgcggagatccatactgtggggggttagttgactatcataagtgatgcgcagttgagaaacttacaaagcagtacttatcaaccagttcctggtacacggaagactcaagctgtggcttgctagataccaaggaggaaggtttctgatccacacgacctccggggcggaagctatcgttcactgcagagccattgcccagctcgaagctgggggttttcttggccggtttgggagtctccggcaccacggcctccccagatttcgcacgggcagtcagagcggtccgatccaggggcgcctttgaccgaatagcagccgataacgacgctccaaagtcgtatcggttgccaaatgcctggcggttcgggttttcacgacgcttggggggtgcgaccgtatcaatatcatccgacggcatgcgagccaagggcgcaccatcggcatcatcgaaaagggatgtgaaagacttcttgtcgttgaacttcttgtcgctaaggtcggggaaatcatagttgggcggcatagactggggtcgaatgttatggatgctggtgaaggatcgactgcgcggaagagcaggttttccgcctgcaggcttatggatcttgggcactttgtggaaatcaatctgatagtttaccgaaccattgttgtcccaatattcctgtccatccacgttgtagcggatgcacatgaacatggtcttggtctccaggttggcctgatcatccaacttcaggtcgaacgaaaagcgatcgaacccgtccgctgcttgctggcggcgaacatcgtggcagtatgccgctgcaacctccgaggtagttctccagtagtccagcgtgaaccgagcggtcacactcttgtggaaagcaagattggccactgcgacatttccgatcagagtgctcttatcagccgacaagaacaatcgctcaaggcgcaccgggcgagtggcagctgatgaggtatccttgggccaattggagagcttgatctcccattcccacgaccgaccgcgcgcatccgaagagtcaaaggggaactcgtgcttgttgtcgtggttttcgactggagacgtttcggtgctgacagccaatggccggtccagctggaggaagtgacggatatgctccaagtgagagtcgaaatgcacagccttcgaatagacgggagtaccgggcatgctagatggtcgtcgtctggccgaagaggggcggagagcaggtcgaaccagctcacctgacttcttacggaccatcaggggcttgcacgacatctcctcgtcactttcgtcgggcgagctagtcaatgccgattcccgagtcaactcccgagtcaactcgatggcggtttcagtggatgatcgagagtgagtgatcttgcgagcttctttggacaatggtaggtgagggagcttggggcgagtggtcggcgcactcgacgagagccgctccggtgtttcagacgaacccattctttccggtgaactctccctccttactttgattgatcgaacagcagcctgcagctcgtcgtacctgacaccgtcgccgcgtcggcgtggtgattcttcatcacttgagtttgggccggactcaggaggggnnnnnnnnnnnnnnnnnnnnnnnnnnnnnnnnnnnnnnnnnnnnnnnnnnnnnnnnnnnnnnnnnnnnnnnnnnnnnnnnnnnnnnnnnnnnnnnnnnnnnnnnnnnnnnnnnnnnnnnnnnnnnnnnnnnnnnnnnnnnnnnnnnnnnnnnnnnnnnnnnnnnnnnnnnnnnnnnnnnnnnnnnnnnnnnnnnnnnnnnnnnnnnnnnnnnnnnnnnnnnnnnnnnnnnnnnnnnnnnnnnnnnnnnnnnnnnnnagaggggggggggggggcccgagccgggggttctggagaggaatgcactgtcggtttggtgttcgaagggttcctccgaggacgagtagcagaatgtggacgagcccgtgtcggggagcgaaccaaacctggccgctctatgggctcggtgggggagtattcaatgtgctgcgcggagagcaacttctttaccggcgcaatgtatggcatccggccgacttgcgtgtctcaacacaagaaggggatgaaaggtagataggaaggactcgggggaggggtccaaatgttcaatcacagtacagtgtctgaagtagcttcgccgtcagtaaggcttcattaaattccgggtttgtggcgacgggaggtcagtggcaaggcaaggcaagaggcgaggaaagccagcacggcattttcatcgaggtatgagatgggatgcagcagggtgacacttgaggaaggtgcccggtgccagtgggggagtccaggttgcaccggtcacacacacagcgactcagggaattgggtagtcaattgcagaaggagagagattatcaataccgtgaagtatgaacatcgagtggcgatgtgatattagccaagggcaagaggagaaggaatttaaaatagtacagagaagagacaagatgtacatataaagaagaaagaaaaggcaagctcccggcacagccgtgatcaggaggtgatttaaaaggtatcttggaagtagataaccttggaagttgtgtatagtggcaaatcaagccattcccactatgactgtgtgagaagataagccgggatggggaaagaaaagatgacgaaagcgacaaaatccggtattatagctttttccgagaaaatgggaaaatcattaaaatcctaaatgaaaaagtggggcgattaaataaaaataattgtgccatccgaccatggaagagaagtcgaaaaaagaattaatattgtcgaggtgcgtctgctttgcatagatatacccaggtcagtgcgtcccgtataggtgggggatatttattttctattttctattatattggtgtctcttgttttgtcttttttggtctttctgatatttttggtcttttgcgtgcttatatatttatttattcgaatattgatttctacctgtcagtgtccattgttagtgtcaatggcctgattataatattcatgattcaggatactagtagaatctacgttcggcttcctatcccctccacttcctatcccttcaattctccgacatgtggtctattcgcacgagcacgttggacgatcatctcgcaagctcactataatgcactgaccatcccccctagtgtcacaattagcggactacagccctcctatactcggcgctaagagggtccatacatgtccaccaactctgcttcaacctgtacgttgtaattgccttgatgcatgtgtatcaccatgactaccattccccatggtccccatgtatctttcaaaatactccatatactgcataactatactccatatactcctattatctatgtaagattccctaccccgatcttcccttatcaattcactagtgccccgtggcccagagattggtcgagatttatggatcggcccagccaaaaccggtttgttccagattctcctagcctgtggcaggtaagaagacgctgcttttctttttgggcttgccgcgcactggtaagggatacattgcgccatgcaagtgctagaagcataatatccactccgccatcccttcgactacaccgtgcatactccgtcgattgtatatatgagattggggctagaaaatacaaagggggtttcaagttccgctgggaactggagttggtgctaccggccgggaggtggctagagcgtagaggcaagtgtctagaatgtcaaatagattgatcatacactgttatcgagatttttctgacacctcccgggaagttatctgcggtggtacgaccgagggctttctttcccgcgacacgaccgtggttgccgatttcattattcgggttttatgtatggaattctacctgacgtgcatacggaggtgtaggtgtgcattggaatctcctaggtggtagtagttgtaccctgtgtgatcgggggagttcggtggagactctaccataccttgcgtgttagggctccgccgagggtgccgtaaaatgccggacccacgagaatggagatatcgagatatggatgtgcgattgttcacgtcgtatgattgccctatgatttcccgattagcgtgctcactgaagaaagcacgaatcaagcccgaatccagaagccaatgccaatgtccgaatgcagacccgaaatcacgacttgcataaataatctaattcgagtggtaattccacgcggctagtccatgatgtcaaggtgcgtttgatagtccccgatgccttggttttgcctacttggcgggagtctggaccccggtcgctcgtgcagcaactgtcttgtactccaggatatttcatacataggaagtatcatgacctctgtattatttgatctttctttccatagaaggttgagtggcatgagaagtacggagtatatgtacgaacatcatcattgacttggctgtgaatctctagggccatatctggtttatcttttgctgtgccccgtttcatcccttcagctcgccatgtctcactaatgaagtgtcatacaacggatttatattgatctccattttattcattttatatcatttctatttcccgttccatttccatgccggagtacggagtacggacatagacgccgcccggaccaacccctttgttagcggcgcagagttttcctcttttgccactccattcaatgaattcccaacaaaacaggtggcttttagatggcgtttggatgccacttgctagtgtgtatgtacttttatgatctcctcggaaatgccagattggcgagcccatggcgcagtgggtactcggctggagtcccgacttcttaactgctcgacaagtctcgaactttcagatctgcatacctgaggttgatctccaggttttcaacccctccttttggacctttggagaacgtctggagtcccgcaaaaccttggaatctatacggagtagcccacgggcgtacccgatcatttcccatatgaacgtctcggtgagcggcaaggtcgcagcattccgagcggcagggcgataacgtctgtttcaccccttgtcgagactcgagaccctgaaaacctgaaaacctccgtgcgcttttgtttttgttttcttttctttctttttcaattgttcccggattcgaacccctcggtcctccgcctcacgggaaacccgcattgtagaaagtcttccaaggttatagcgaagcggtgtatcctgtgctcagaaccttgacatcagagtttggccttggaattttactttatgacggattgcaagcgcttgctaatcgactattgaaaggatcgcccagattcgatctcacctggcacattgcaattcccaactaacttggacctcgcaaatcgacacattcaccggagtgatgtgatccttgcaattcgccatatctcgctggcgacagtcacaaactgcaagtcaccccgagggcgttcgcgtggctgaactctgacttttctgggtccagctgggtcccgtaccgagaatcatatccaacttactgctaagcataagcttcccctgctttgccttggtaaatacgaacgctttgggcagcggcctgtccaggttgaagttgagtacgaagggaattgagtagcatgcattaacgagatgacagaggggcagggcgtttctggagctctacaacatagctaccccgcgtcgatttgatacgtctcgcagctcttgcattgatgcatgcttttgaactcggagttgatgcgaccggggccccatggcgacttgtgttatggtccaggttccccaaggtttcttaccccgcgagctataccccgggattcgcgtcgggcagttatcagtctggatctgccaatgggatatgggatatggctggtacaatgtagaagtagaatctgccagatatcccaaccacagaccaagatgtgtatccctccgatttacctctacagttaaaacgttgtaatcaaccatccaattcatcatgtcacacaacatccacattccaacccgtttcaaccctcatatctcacctccatagcacaagatagagatctcaacgctgattggccgatagctcaagaataagaactcgcacgcaagcaacgcatataggctgctatgtatgcaatgtcgcacgtcacgcaaatcccagccctgcaatgcacagcaccgagcaccacctgaccttctacctttcaacatccctgttctgcagttctcaaggggcatctgtatcccggacgttgtatctcagaaaaaaaaaacgaagtggcaccaccgtacggagcacacagcttgacatccaaccactagcaagacagacaggcgatcaggaacagccgctttagtcgattccgtatacatcggataactaactaggtgggtatacaacgtacatgatgtgtactaactcagttgagtgcagcacggacgttagtcgtgcagatgagatgagatgatagtaacactagaaaagtatacttccaatatactctctctaactaccaactagtctctttcgaatttagcacacacggttggatatcttggctagaccccacgcttatgcatagcatgcgatgggcgattcaaaaaaagggccaaagcaacaccccaagattcgacgaccggccagaacggaggcgctgctgtcagtgcgcgcgcgatcccggagctaactacggagtacgactcgataggccgtggtaatagtggggggagggcgtgaatcgctttagttagtctgcgcgggcgtgcataagacgctgcattagtgcggcgaactaacagcgtctctatgcatgaccgacggggtcagtgcatgttcgctgtttttctgggctgggggagcaggggcgtgggtttatctcagggggtttcaggactttgtttacactttgcgcttgttggatgaggtttttggtggcttgttctggggaaaatgatgtgcaacttgcaggtgtaccccgacgtcgcggggtttttctctctccacatttgctattttcggatatgggtggttggcaattcgtctgacatgtcgggatttgggaggctagtctgatgtcgatgtctgttgagaatgtgctgttgatattgcgattccgtgctctcggctaagttgtcatttgtgaggagtccactatttccagacctaaaaatggatggcaatctcggaacccggatggccagatatgggtagattacataacagtcaagccactcggctatctccaaccgtcataatacgccggggcgacggggattggctgcgtagggcccgttatcattccacgcgggagaggcgttctccgtcgtcagcgttatagaacgcccattttgaatggaataagttctggatttggggattggaccgatatccatctgttcagacgcattccttgcagcttggaatgtttcctctgtagatgcacagagataaggacgcggggtagttggattcagctcgttccctcgggtgggtcaaagggtctgaaggaataatgatcgctgctaggttgatctacattcttccttgtttgctatcgacgattatgcattcaaacgtcattttgtaggccaatcgtttttatccctagcgagacgacatctaagagggaaacagggatattctaccatgtctatcgacccgcctacgtaactggcctttttatataaccagaatcatgtacaacataactaggagtatttaaatatagaatagaagcaccggccaactacgtattcttgtactaaatcgaaccctgggtactttagtttattgctccgaacacactaacaatccatgaatgttctcggattcaacggattcctatcttcggacattgttgtatgcctgcgcccctcaattgcggggtgcatctgccacctcatactgtccgagcgaattctcactttacagctgatagtccgaggtgctgtataccttcccagtaggtaaacagctgacaatgcggagatagggataggatcacgagacaaggtaaacctaccttggaaccctcaactgataacgctagttgacgaatagatcctctgatcttcctgccatccaaggtctcgaagctatactccattcaagccacagcgggcgccagtgacccggccctacaagcggagatccctggacacagaccttccccacacttcgacctctcacgctcacgcaaatgatcacgacatgcatctctcaccgggagatctgaggaaagacagcgtcggcgttaggtttccacgcgaagtcgtatatcaaactccaagacagagaaacacaaattcaaaccccgtgcactcacatgacacatgacacctataatggcaggtgtctagttccgacgttccggcctcgcaacagtgtgctcagactccaagcaaatggcatttcaaagtcaattcttcgcttcctcgcagccaccccctcaccgctacccatgataaccagtcaagccatgggaataatggaaactgctcatgtccgccacaagagaggcgaggtctaaacgacgtctctcgttatccgcctctttttttcccccttttgttgggactcacccccgctcccactttccgtggcgggccaaggactatactacagctcgactgaaactctttcttctcggccggcctggtatgctcaggtactggtgctcggacttgtattgcgttgtcactggaggtacctctatctctgtccatagaccgtgcgtgttgtgcttccatggcgttgagggacgtgtcctgcatctttgccgccactgtgtcggcgaatggggcctttggtcggggagatggtgaagaatagcacagatccctatagtctggtttagaataggtttgtggacttttaagtcaccggtatcgggtgatttgaatttgactctgttgaccgcttgatcttctgtatgcggggaaatggcatatagatttctggctacctgggctgcctggacacaatgcctttgtttagcatatacgcgatagcctttcatgtggaatctcgcggccgagtgatcatctttggaatttgatcaagactgacaccgaggagccacagtttagctgatggtcaattagactcattcctatgcagttgctgatattcttccgctctagcagttctacctaggctacatattattccaattcgaatctcaggagtcaaagggaatcttcaaagaaattgcacggtgcatgcttagatatatgtattctcctgaaacctcagtttgctattttccgcctaaggcccgcaacctccaaagatctcatgatggaatcaccatcttcgatcttccatctaccacattgctatgttttctcaagtttcatcgggtgtgcaaaaactacccgtcgagaaccactctgtaaaagtggcacaagacaaaattctctccaggcagtccagattcaaagtccgaaagagagtcgaagttgaagttgaagttgaagtgttgttggaagtgaaaaggtgaagctgtaagcgggagatcacccattggtggagccaactccatcccacattcacgaaccttggtcctcacctctgtttacttcttgacgggacttttccaaaacccgatgtctcaagttcaaagttccgcgttggcagatcttgagaaagagctggtatgctcggtatgtacttggccatgccaccccttgcatctctaacactctgccccagatttgtaccgagctcctctaccagcccctcactctcctcgactgcctccacaccttctgcggatcctgcgtgaaagaatggttctccgcacaaggatcgcgtcgctcccatgcctcgcctcgatttacctgcccgtcctgtcgcaccgaagtgcgcgacacccgcccaaatgccaccgtcacgaccctgctggacatggtcctgaccgcgcaccccgagcgtgctagagctgcagatgaaaaggcggaaattgctacgaggtacacacaaggcgagtcggtgttcccggcacttccttcgggcggggagagcgcggaggatggcgaggacgatagacgcctgctggaggatgtacgcgagctgagtctacgcgaaagccgggcacaagctaggcgcgaggcccggcgaacgggccagtcttcgcggacgcgcgagaggagcacccatatcgagaggcctgcggaggacgcccggtcaaggcggaggagggatgaggatccaacgcggcagccacgtacgttgcggcccgatgattcggaccgtgcccgacgggttgagcatcaatctagtctgcgatcattattgagtttgtcatctgatgcggagactatggaggaagagattttgcggcaaattctcgaggacggattactggacaatatcaatcttgagaatcttgggccgaggcaggaagaggaactcagtgaacgcatcgcggatgcttaccgtcggaggcatatgcaaaggtcacagtctcgccagcgacaggaacagggaagagaacagcggcaagagcctgacggagctgtgcgaacacattctcggtcccagtccgcccagctgacggaaacaatggcgactcgagaacataatggtagacgcccgccactttccagaccgcatctgttggattcggctcccgcgcggccgagcaccgcgggccatccaagtgcgcgccgaaggacctcgcccgtccgaatgaacccggcgtctgcatcggatgaagctataaggcctgctgctagatcctcgagtgatgtcactacggaccgccacctctctcaggctggacgcttacgatcgggatcatcatccaccaggccgcgacgtgccacagagtcagaacagaacatttctagagcgtgggtggccggaggacgagaacgaagctcttccagaccgaccacgagccaatcagccacgagctttcccacttttagcgctgcgccctctaattcattccgccatacgagtcacaccgatcatacccttccagcattatcttcgccccttgttccagtccggtcagacagacgaacgagaccatcttcgtcccgatcgaatgttcctgcatcccccactgtacaataccccgagccatccatctcctgtgaccgttgcggaaagaacaacatccaatataacctacacaagacatgcacaagttgtaaggaagggaacttcaacctgtgtctacaatgttaccgcgcgggacgtggctgtcttcgatggagtggatttgatgcctccgcacacacgacctttcaacgaatcatatcgtcgtctactcgacgccctttacaaataaatgactccggccatgacttattgtggttcaaatacctgcggccctccgagactgcccatcaaaccgtgagcggggaaaccaaaatgaccaacgacaacccagcccgccggctacaaagcggtctcttctgtgatacgtgtcaatcgtcgacaaacgattgtttttggaaatgcagccactgcaacgagggagactggggtttctgtaactcctgcgtcaaccaaggacgatgctgcacccacgccttattgcccatccggcgcattaccaatagcccatctccaccagcaccgtcccccacatcaccggctggatcaaataccctcacgtcatccgagatcgagagcttcaaaatcctctcattctcaaccaactgcgatatctgcacatacccaatcccagcctcaaacacccgctaccattgcctggaatgcaatagcggcgactacgacgtctgtacaaactgttacctcaaactcgtggcaacaggcaaaatcaacaaagagaacggacacaacggctggcgccgctgcctcgccggccaccgtatgatagtagtcggcttcgaagaccacgaagaaggccagcgccgcgtcgttgtacgcgatctcgtgggtggccgcgctctgaaagacgagcacgtagcacaatcaaaatcacactcaccaacttccccagcatccggttctccagtcgcatccccagagctaggaaccggtgactggagctggaaagaaggccccgagcgccgtaagaaagcatcccgtctgcgccccggacatgcccccacaaacagtatcaccgggaattattccgatccctcaaatccagcacattccagtgccgcaagtccggttcagggcatcccgcccttccgccggttcccgcctgacggtggtgtcgggctcatcgtccatgccctgtggtcctggtacccggaagaagaagtcgaagacgagcttgtttttccgcgcggcgcgcatattaccgaggcggagaatatcaatgatgattggttctggggatgctatgctggtcggacgggactgtttcctggttcgcatgttgaggttattggtgagattcataggtgaagtgtcttggcttttttcttttgcttttgaacatcacggcagatatgataagcatgacatgcatcgtatcatatctgtttttttttgcgtttcttcgttgcatggttacgatatttatgatgatcggagttatgaatttggatgctgcatgagcgtttccgagcattgcatacatagcatattgttacttgttagattcaacgagccatgggcttttctatgtctataccgtgatattatcgagcgaatatagattctgtgatgtatacctacataccaccacgccaatgagaccgccaaccagtattcccatacagacacgttatttcactactcatattccattcattcctgtagtcttcgttattcctgagaatgtgttggttattcctgtcaagataccagatgcctgtttgttgcggcatcctagctgagttcagtcgtttgtggcctataaatgtgtacataaaaatgaatttatcaatctcttctcctttctaaagcatactaacgatgactacctatccatactacctgctttactttctggcaatacgttagtgaaaccattcgttcctcaccttacattcattcgttggtttaattatctcctagctaattgccttcttctaattctcgaacagtggtccgcggtctcggttacagctgctgctggcgagtttgaccctgtactcagtgctccagggtaattgttgtggcagacacatccagcacctcctcaatctcctctccgccgtcgacggtctaaactacctaaaccagtagatcctatcacagaaggccatctaccagtaaggctgttcttttggaacgcagcattgctcctgtattcctacgactgggtatatagttcgaggatcccgtggggccaaacagcaagtattagtatactatcccgtccaccattcgctcaattaggccgaaggctttagccgggtcaagttgatgctccaccatcccttccgtgcaatcgaggaactactcgagtgagacggtacccgatttccctcattcaccgctacataccagcattgcagccttgtacacactcatccccatgacgtctacgggaaggatctaggcgaggagacagaggagctatttgaggaagaggatacggtccccgccgataaggagaaatacaggccaatagtactagaaagcatcgtaacaatttcacgaaaatagggtcttcctagtatatttgtatagatagagagctctctgtcaccttctacacatataaaccaggaacagccatcgggcaggactcaagcgccggataataagcggtagctaaaggtcatagagacattatcctaccaatccaaaagccgaatggaataagacacgagctacgagttcactgcgaatataagccaggaaacagattcaacctgcttagcctgatcaagatacgccaggaccaaggagtcaaatgaaaccctgacgacatggtgataaaaccttagcggcacaacggccgggacgtgatggtgcgcaagttaaagacccggacgcacttggccagcgtgcgccaccaattcgttcttcaaccggggggtattgtttctctttaatgggttatccaaacttctgtaattgtaactctgattcaacctgtctgttcatgactcctattaataatctcttgtggccatgaaagccaatctcgatatttcggatccaatacagagtataattgggtcataaggcgcgagcttagaccttccatccaccacatccactcgatctgacgaatagatgcgcaccaatgagcaaagataatgagtgcaatcggtgcttcctggcgcagaagatttaaatattcatccgagacatcgagcagccatcggaagatatccgcggtctcgagcctccgcatgatgccaggtcttatagctaggcccaatgttcgggcaagttcatctaaagcctcttggtagatcgaccggagtgatgggtcagccgcgcactccctccatatcatttgctgcaactcccacacatgcggcttgccttgctcaagggcctgtggcgagcgatgggcagcagctaaataagctccattcgtgaagatcggtgccagcctcccggtacgaagatcctcgccgccggtatggataacagtcgttgtccctcggaaaagacgggcccactctgatagattgccgcgctcaaacaggaccaggaaatcgccttcttccgatggcttggcgcaggagaacatgcacgttaaagaggagaaaatgaaaagtgccgagccgttttctcgtgcgagcggtgagacgagcgggatcatctctctcacggcggtgctgtggtgcatctgtgcgtgagcgaggcaggctgcacgtcgagattcgtcggagcgagctagatggagcgcagaaaatgctagcaaggtgtgcaatactggcggcgttgcaaagccgattcgaggtgcttcattgcaccagacagtctgcacagtgggactgcgcgatagtgtgtaacaggttgacgttgtccagtgatgcaacagttccaggtcaaaaacagccaatgtggaagggaatggtcctaatgaggacaggcttggcaagacttgggagacttgtgctagggcacgactttttccagatgtagtgctttctgggccagatagtgacacgggtgactctgctgagttcgccggtgtggaaagcacagttgaggcactggtaaaggaacaaaccaccccgtgcttctcacaatttcggcaatgtggctggttttcgtcacactgatacagaattataagctagagcgcaataggaacattgatgaatctctcaccttgacttttcgctttttgcattgtaggcacccagatcgcgatttccggtgcgaacgccggcctgggggtaatgtggtcatttcaatcactagcaggtactatgaatatatagaccccgcgaggcatctaacatgtattgcaccattgagatggaatataggaggccaatattccgtggttttacgggggcgtctcaaatgctgggggctgcgctagccgaatccggttagcgctataattttggtgggggcgaagcatccatgggtgtattcttagtatggacctcacgatcgtgataattagaaagaagcataattagttatgctgtgtatgagctggaataattcaaaacagtttgaaggacccatatttagagagagagagatttccctgctcaaatgaaagaatattcaagtcacaatcttgaaggtcaccgaaagaaacaaagcagcctacgagaacaataagataacacgccctcaacacagttatacgatttccaaaatgatacttagtaaaagactatcagtattgactatctagatttaagtatatctgtgtgtagatatatatttcgtcgaatgataaaccatttcccaacatgaacttcaaattatttcgagtcaatcaaatcttgaacatctagatcgcagtaatgttgataaccatgcggttttacataatgttgtccgcaaccgtctttgatctagagcctgcggccggacaaaacggtcgaagtcccgttccattacgtagccccgcatctctggtatgctgcacctccttgcatatgtaacgtgtctcgataagacaatccgccctcataacataggtcgagcacggctctccacttggcctgcatgcatgacatcggacgcactgcacagtatcctgtcttgaaccctgataactgaccgctcttcttgctcggtctctttaaatgaccgaatgagcacatacattcgtagcatcaaacccaatatcagcgaatatctggcaagatctcccacagtaagtacttggcactctgagtcgcgctagcgcatactgatcaactcatagatgcctcaaggaactggaagcctgacaagcgacaaaggacgagtccttggtcaatttgaagttgaaggcgctcagtatattttcgtgggcaatttgactggcttcgggcagtctttctcccttcccaatgccgacgtcacctatgagtcagccgaccagttacacaaagaatccgaagaattcgaaaggttgcccgtagaaaaagaccagattgaactcaggctcaagaatggggttgcaatcacaggcggttttgatatgccatttagcgatggcgagatgaagaaagcgatcattgtcggcggtggagggaaatgggtgaagttgtgatttgctgagtcatgacttttgaatgtttgagagaacttgcaatgttggattgaatgaatcagaggataataaatcaaggggttggaagtgaaacgatgtccacttagcatcagtatagtggaccgaggctatcaaacttggcagtaaggcaacaacaatctctttaattagaacccacaaggtcgaaccctgaatacgaaacgtcctccactcgtgaagattggcagacgtcaacaattctagaaagccggcagggctgtgaacgcccccaccttactgcgccacactcgagccgagctgccggcatataaacagcccctcaaccctcagcccggaccatttatgacctgcatacaacgagccgcagtctaccatgtcttaccaacctaaccgtgagtggcatttcaaatacatttctagtcttgacaggagctaactcagtcaatagaagctccgtatggaggatacgcgccccaatacggacagcaaggcccgcctcaggggggctatcagcagccctatggtgcccctcccccgcagggccactatcccccgcctcagcagggacattatcctcccccccagcaaggccactacggtgcgcctcctccgcagggagctccttacggcgcgccacctcctcaaccccacggataccatgcgccgccggcgcaacccccatacggccagcagccacatggctatgcccctccgggccaaccacccgttggttacggcgcaccaccatccggcggcggttttccaccccagggtattccgtcacagccgtctcccggctacatccctggtcaactagcaccaggcgagttccggccccaagcagatgcgcttcgcaaagcaatgaagggcttcggcacagatgagaaggctttgattgcagtcctcgcgccgctcgatccgcttcagatggccgctgtccgcgacacatactccaagcaccttggccgcgatctgttcaaggatgtcaagtctgagaccagcgggtacttcggcgatggcctacttgccgtgctggatggaccgcttatgaatgatgtcgacaacttgcactcggcaatcgatggtgctggcacgaaggagtggttactcaatgagatcctgctcggtcggtccaatgctgatatgaatgctatccggaccgcctatgaaatgcgacacaggcgttcgctttctaaagatgtcgaaggcgatctctctttcaagacgtccactctgttcgccattgtccttcgtgctgctcgccatgaagagtctacccctatcaacccgcaaaccatcgagactgatgttcgctccgtgcaagggaagaacgtcacagaggtttgcgcaatctttgcccaggcctccaatgccgaactccgcgctattagccagactttcgagtcacgctaccatatctctctcgagaagcatattgagaaggcattctcgggtcatatggaagatgccctgctcctgatgctccgcacggccacggatcctgccatgcgcgatgctatcctactcgagcaatccatgagcggcatgggcaccaaggacgagcgccttattatccgtgtagtccgggtccactggaatcgcaatcacaaggagatggttaagcgcgcttaccaacacaagttcgggaagagcttgattgaccgcgtccgcggagagacttctggtgattaccagcgattgatggttgcccttcttgagtagaaggcttttttctttctttttcctttttttattcctgtacatttatgaccttttcctttgttcatgatggttacatttattctgagataccatgatctgacatgaggaatgtgttacgcgagacagatagtgatgtgctacatacagtacgagacgttaaatatattatattctcctttgaccatcttcggaaccattgtatttgcataaatcagattaacggtgtagagacccggatatttacaagttaatagtccacttcgtccgcagcctctctccccaagtttggaacaaaatcggtataggcgccattgccaaagcaaggaatgccagcaaactatttccccacccaaggccaagtttctcgtacatttgcaatccacacagaggaaggagagccccaagcaagcttcgcagaacagtgcaggcagccacagcacttgcagcatgtgcaaggaaagcatctaccagatatgtctgaacacacatcaatataacgatcatcccgaaaccagtaacagcatttccaatctcgggaacgatccaatggaccactttatctgtcgaccatccatagataaagagacccgccgggatggccaatgacccaggtatggtaaggtacaagggaagtcggtcctcggggataggtgtctccttgcgcgcgagtttgagtttgattttgcgatcactcaacgtccccacgtaggcaagaccaattaacattcccaccccgcttcccaggaatgagaggccgctggcgctggcagagaacccatactgaccctcaaagacaagtgtgaatgttgtgaagaggatgtagaggaagccgtaaagaacggcaatgtagctggacattaatgccactatcggggacagaatgagcattttagatggacgaatgagactccgcaggaagagctgttttggagggactccggtgtccaaacaagatttatatgccgtatctcctgttgactttcgcagtcgagcagctttccgctcaaggaggattggggcatatgtctcaggcacggcgaaaaagaagacgatcgatgcgactccgccctgaaaatagttagaaatgagacagacccttttaacctggtattatctttcttaccgtgatggaaagaacccaaaacacccatcgccaatttgtagcctccacgaggaacccacccacgacggggccaatgattggaccgaacaggggtcccatggaccaaatagccatcgcctggcctcgtttctctctcggcacaagatctgcaatggtaccactaccacatgtgatggcagcgacacccgcaaacccgtcgagaaatcggaaaaccaccaaggacgccatattgggagcaaccgcactggcgatattgaataccacgaacaggacattgcaaacattgtagacccatgcgcggccactatactcgctgaccggtgcgacaaccagagggccgaaagcgaatcctagcacgtaaaccgagaccacgaaagacgagaggagattagatgttgtaccaaagtcttcgaggacttgtgtgatacccggcgcgaacatcgaagaggcgaggggactagtgttgttaggaccttggtctatactagatatataagtaagtactcacgtcaagaaagtgatgaaagaaaccatcccaataatagtccatttgcgtccagaactccagttcatcggattctcagggtcctcgctggctggctcttcccagaagacatcgtattcggacatatccgccgtgtattcgttggacttctcagctgtcagtacggtagattgcgcttcaagatcagacgattttgtgtccatgtcgagggcaccgtgaagacaaatccacacacatgggctcttgggtgcggcgacgggcctttgaatgatttcaagtctgtcatatgcaagagatgcataattgccaccggactttccatatccgttcgcctatcaaagggtgcgtatactaaattaaatccccacgttttagaccgagggacttcggattcgtatatctcgtggggtccattggctaacgtcggacgatctaaacccggcttcggcttcgggttcggattcgtacgagggtttgacgtggtggctgatgggattcgggttctcattggcgctaggatgaactaattaagcttggccgttatgcttcaagatggcattgttacagaaatatcattatctgcgatcgacgcgtccccgatcaacatggcctacctcggtgggtcaagacctgcacatataaaagtcaagacccccatttcgcatcggactctgagataacctataagtgaacatcgagacagaatgggaatttttttcaacgtgcagcaggtgctgttaacggggctatttacggtatgtcatgcgatgccttttgacttcttttctaatgcgtccaggctatactatatcttgcctctaaagtgatctacaatgtgtattttcaccctttgagccggtttccggggccgttggagcacaaaatatcacgactgccatacgtctaccggtctatccggggaacccttccctttgacatgctggaaatgcatcagcaatacggtaacattgtccgtattgctccggatgagctggccttctcccaccccgatgcctggcaagatattatgggccatcataaagggaaaactgaattttcaaaggcagattggttctaccatgcggtcgaggaccaaccgtcacatgtagtcaacgaaaccagagagcaacatggacgtctccgccgacaaatggctcacggtttctctgaaaaggcaatgcgagagcaggaaccaatgattcgtggttatgctgatatgttgcttgaccgattacatgagttttgcgagtctggtagtccggtgattctttctgattggtataactatactactttcgatatcattggagatctggcatttggtgagccatttggctgtcttcagggatcaaaccttgacggatggatcaaggggattttcgacgccggccggcttggaattatcctgcaagctctctctttctatccacttgtgaagcggacgctactatcgatggtgcctgcttcaatgcaagaggcccacgagaaacataagcaactcaccgaacagaagatgatgcgtcggattgaaaaggaagagggtcgacccgacttgattgagggacttctaagaaagagagaggaattggtgagtatttaactaatttccgttcagaatgcaactgaccattgtcagaacctgagcattgaggaactcgttgcaaatgctgaaatcctcattatcggtggttccgagaccacggcttcattattgagcggggtcacttacctcctcctcacgaatcgcactgcctatcagaagttgaaagaggaagtgcgtactgtgttccaaagccaggaagagatcaacctgatctctgttaacatgttgccctacatgcttgcatgtctcgacgaggcaatgcgcatgtatccgcccattgcaaacggtcttccccgtgtatgtcctgaggccggtgcggaagttttgggcgaatatattccagcaaacgtgagtctcattggcgtgaatactacatattgatgtctgctgacggcgttttgaagacttttgtttccattcatcaatgggcactttaccggcgcgaagagtatttcaaagaccccaacacataccacccagagaggttcctgggtgatccatcatttgcagacgatcgtcgagaggtattgcaaccattccatactggaccgagaaattgccttggaaggaagtaagtattgacctagttgaccgcaagtaacaggcgatactaacggtgtcactagtcttgcatatagcgagatgcgtctaatccttgccttgattatcttcaactttgatatggagattgccgatgaagccattgattggattaaacagaggaacttcctgatgtgggaaaagggtccgctgaaggttcatttgactcgggtatagacttatttattagacgcaggaagatagattgaatgatgaatccctatttggcaagtgatactcagtcaggtgatcttctggataccccctccctctacttctgctctctctctcacactatccagcattcttcaactatactcctaaccctcccacgcatagcataaaattaggcttacttctaggagtattaggaaaagcacggatctaacttacatataaacactgtccctgtcaaatttgttgcttggtgatcagtcattcggttcctctggaattttgtcatcttcttacgcgcttcctatgcatctttctatcgccccgaatttcaccatcaacaacactgcacagatcgggatacatcctcttgctagttctgctatacattttcctagcgatcttcttataggtcgtcacttacgtaccactcccgagtcccaacttcctaagccgattagagaagtacactcggccacctgctcaattccccctatacagaaactatacgcgaatacttcaacgaggcctaccgaatcgagcagggtctgcccgtaaggggactcacctggtctcagggtcgaagtgttctagggcgatgaaacgatgaaaataattaaggtaattgattatccatattaagtcctgcttgtacaatggaaatcccacacacctcacctcttcctcttcctctatggcacatatcagtcatagcatcatgcacgccatatcgaaccaaaaaaaacaagtacatagaagcaaaacaaatgaggccctgagcgtaagccacaaagcccatgtcttcaaaacgctcaaaaaaaatcaaatttcgtcaaggcatatatatgggtatttttcagcgtagagtatcagtcaatcatggatctcataaaaaaaaagaaaaaaaacaagcagaagaggaaatgaaaatgaaaatgaagaagagaatcaagaaaaagaagaagaagaagaaaaagtaaaaacatatgtagttccactacacacttgctgtgcgtcgcggaaccagactgggcttctgagcgtacgcaatgaacatacggaacccggtgccacgcttctggcactcgcgaagcaccttccggtcattccaaatactcggaccggtatttccaatcgaggcaataggatcctcgtagcatttcgaataccaccagcgtccgacgcgggcaacgatcttagcgattgactcgtcatttgccggcgagggggaaggatcggagagcaaatcgccgagagagatattcgcgtcatttgaggggggtctcgaggcagttttcgtactttggccatcacccgcagttgtgacagatatggtgggtagcgagaatgcagtggaagagggagccattgaaatggagtgtgctgaggagctggagtcggaggatcggagcaccattcctgcgactggaattcggaccatgcagcgacggagactgtcgaagccctgcgcgccgagctcgcgttgtacgctgtcgctggttggtttcaggctgagagatgagtctgagaggcaggtcatttctttgagttggcggatcgctttgcgcgtgtgaggtcccatgttgaccatgtcgcggtctaggaggctcatttctagatatcctcctgtgcggagaacacgtttgcattcttggatgatgttgccttggactgtctcggagcagacagcgggaaatcgtagtaccgcgactgtgaaatagtcctttgggaaggggagagggttgtccagtccggcgtgatacacaatgtggtggttggtaggaggctcccatgcagcggggtggggaggcgccgcggatacaggacgtccacccaggctatatacctcggcatcagggtacgtcaaggaacagtagaaggaccagtcatcatttcccagtccatcaatcacaagaattcgcccttgtcctccggccttgacgtgattatgcgccgggctgaaaagaactcgaccgaatgacagccagcgactagtcatgagcgaagcagaacgcatgttagtccgtgtcactgcatcccactcacgctcggaagatgcggcttcttgttctcggtggaactttggtctgggggaagggacggcagcgagggagttaagaaatgtagactgctgttgacgacgctgatctgtcgaagaaggcttctcggtaagagcggcagcctgttgcgtcttcgcctcatttgagcctctatgtccggcaacgagatcactgtaagacggttgagacgaaggagcggtcgaagattgcaaagcagagacaatctgagaacgacgaagatgaacagagctgccactcgagcggactgaattaccactaggtactgattggggattattggcattactcaattcatcctgaagagccctgcttgccatcgttgcaagctcaaacctgtcctcttcttcggtcttttccgactcctcgggcttcggttgatctggcgacagaacgtggtcaataagatcatcatactcgttccacacctcgtcatcggtcggcggagaacctggaatcgggggcacggctgtaactgcagccagagctccagagctatctgacgaggttgagcctttcttcggcggaaattgaagaaactcataggttgtgaatggcccagcaaggaattccaaagcgctagtctcctcggaagcgctaaaagtcgggttgaacccatggccccagtctgaagattcgcttggaccaatccccaaattcaatggaacattggcgacaagtggagattggtatgagctttctgtcgttggaaccgtgagggaagccgattcggcaacactgaacggacgcgagaatgactgcatggcgggttggtgatttctatcgcgccgcgaaactacctgtggaatccgaccgacagaagccaagcgcggacgttgttcaggtagtatttcaggctccggggccataaggttgcgattgaacatggcagtcctcggtgatgggcgatcatcattttgaaactcaccgtgcatctttggcggagatggcaataaaattgacggctttctttttctgatgctcaagcctcttgggatttccacgggctggaaaaccttttcctcctctgttggtggtgagtcttcgatgttgttgatgatttcctcgagctcgtctgaatcagcatccaccaaggcgtaatgggccacgggccgacggttgagaacaggggagattgccgcatgaagtctcgcagtttgggatgaggtcgctggaggaattgagtccttctgttcgttggcacggttcttctggaagaagttccacacggatgtctttccttttttggagtgttgcttctcaacctgctcgggcttagggatttgttcagcgggcgtttgcgtacgcttcggttgctgtgaggtggcactgcttggctcatggctagggagcgacgtgtttgtgatagcagcctgggggttctcaaacatgccatgtctctttcctcttggaacgggcatgcgtgaccttgatgcgtttgaacgatcactcgcgttagattgggattcggagcccctacttcccattgatctggcgccattagaataacttggcgtaatggtctcaccaaatgcccccgaagtcgcgagggattcggtagactggctagtcgagtatgatagcagagtttgccgcggcaagttcgaagtggacgcaacgcttatgctgctgaagctctgctcgctttgtgttcgtgacaacgatgagccgtctagtccaccaccgttgataatgacgggctccaggcggctcattagaaagtcgtcgatttccaactccgggcgactcgactgactccctttgctggcggcactccgtgtcgtgcttgttgatctggttcttgtcccgctgctgctactaccgcttgctttgcggccgcgctgtccatactttccgtagccctcatgacctgttcccgcagctggacctttgcgagtagtagctcgaccttgctccgccaaattctctgacatatccggcttggacttctttgtgaacagaccgaaccgtttttgagttggaatttgctttgaatccggcttctctttgggcatctccttggtcagtgtccggggtgtctttttcgatagtacgggagatccgccttcccgagaagggacttgagagatgcttcttgattgcagcgagtctatcgatgcaacggcagactggttgggagctgggtgtggctgttgggtcgccataatcttttcgatcgactcgcgtcttgtgtggcccgttgttctaagataccgtaggttgctttgaacaatcggcgatgtttcaagttctaagcgatgcgttccatctctgctcggtcgtggtggagtttgtggtgtctccgcattccgtgagggggaatattccataatctcttgtgggtcaaacaaacgcctctcggcttcctccacttccttccgagcctgttcaacgtcgatatccggagcttttggagggctgaaattgacggatgactttcttggtggcggactgcggggcgggcctcggggaactgtagagggagatttggacgatggtactctctggccattgccggtgccgattgagcttgcgccagaaggctttgtaggaagtacccgtttttgagtcttgagctccggcctttcttgctgggcggttgcacgtgccggtgaaggagagaagacaggcaatcttgtttgcgacgtgctcggttgtctcagacgaccaatctttgtaataccgggggaatatgatgataatgatgttggggtagacccccgactccaaatactgggagattccgagtatcttgtcgaggggctacttgacagtaagaagggagtaggaggcgcgggcaagttttgcgtatcgagggtcgttcgaaggcttgccaactcttccggaccattgaacctagaccccaccgagttaatcgccagattactctcattcttgtggttcggtttgtaagaggaagtcgattgccctaaaagtgaggttgacgaatttccgtgtcctgacacattgttcataacgagagaatgaggctcttgcggaatgacaaggctaagcttctccgagtgcaattgctccacatgtttccctattgtcggtgccctccttcgtagaacattccgtgctcgttttggcgggggcaattgttggccagcaacgaagagcgatgttctgttaatctccgggctcgaaagcgtcgagtgaatcggctgggtgggattcggagaagaggaagcagacactggcgtatttggagatgttgtgctaccaatgctggggcgtggaagcatggacaggcgatttccacgactagtagatcgcttgatagccgacggcgctggtactgggccaataccttcagcatccgagaatgacgagcttctgctcctaggggtgtgattggctggtctcgcaatttgagatctcggaggtcggccataggcaccagcattgggacgcgataagtttgaagaagaaggattgtgtggcatgtgatgggcagaactgtacgacatggcgtacagatgagtgaagttcccggctccaatccaaggacaaatgattaaacggtgagtacatgtacttcgttatagtaaccatcacgccgttataggggtatattgctgtctgatttaatcagctctcttcaatttcgtcaaattcaacgtataagctcacggcatctgagtcacgtcaaacgaaaatatcaatattgatgggcgcctggcgctcgacagtgggggtatagaattaaataaaaaatagaagaaattcgtaaaaaaaaggaaaagggtatctcaaagtcgcacaactaaaaatcaagtgtcaatagatattacaaggatgtcaagaatcataaaaagaaaaccacatggactcacagacgtcagtagataaacgagaaaagtccactgtggatcgaagccttaaagctgcagctgcttcgccacagtctgcagcaatgtggcgttcgatttcagggttgttcaccagcgctggccacgtcagagataaaatccgactgaagcatgtaaaaataaatgtcaaaagattcaagacaggaatttccgagatgccggagatttatgtgactggggttgccgctccaatgtgggggaaaaagccttgaaaccggaatgcccatgtatgtagtaagagcgtagggatctcattggtacgaaagtaatgtgactactgtgataagacgggaagaagtcaagactgcgaagacctggagcctgtcagaaggactagcacgttgcgaaaggtggtgcttctgaagcgacgacggtccccatcgcaaagtcaaaaggaagttctacaaataaccggggcgatcccccagtggccggatcaagaagattgcgcgcacggaagcccacatgaggtaaagaccggtccactcgagggttctcccctagcagggacttgtcgttggctgctttgcttagacggtatgggctcgcggcggcaaacagggtaccgggctagacacaacgtgacagggcagtggtacaatccgtggcgtatgggcttttcgtcatgcatggcttgagcgttaagaaaaaaaccctacaaaccgtgactcgttcgcgatgtcagatcagctgatagactcaagctgagtatctgcacagtcggaactgcacatggatctagcggacaaccccgtattgaccaggctttatcgcgtctccctcgcctcctccacagcacattcggagacgccgaacaagtcaatcctaaataatgaaatgatcgacgcggtgattttgattttcgttctttttaattttggcggtttgcaactccagcctttcccgctattcggagaatttcccaacgtggtttcaagggaccatgcatatgcggatagacgtaagggtggccctaaaatgcttcatattttccgaaacagtcttatatattcccgatccgatatgtctgatatcgtatattactctgagacatacctttccaacggccgtagatatcaatagtttggtacagaggcccgtcccgaacctttcggggaccattccaaggttcaaggatgaaagcaagcgaagagacttaaagttgggtctagcgtctaaacttgtacaactcgaagagccagtgactgtccgtagagagacaatttcgtctatagaccgggttcgatactcgagccgtggagcctcgagactgtggagcccgctagtcactgggctgtgatggcccactgtatcatggagcaatgaacaagccctggacgaaaatcaaatgttagctccaagccactgtctaaaaaaaggccagctgtcggttgtcattcgcggggaggacactgatccaagtggggagggcgttaacttgggcaataagaacagcgaatgatcacgaacgagaaatgagtctgaaatggcgttgaccagtgtgtgttgtatattgcaaatgtgatattgtatgatgtaccgaatactccatacctgatgcatttgatgtcccacaatcacggtctggtccatcctcgtctaatgactggccatagccatgctgcaggaacaagcgactaatgcacccttcagctgacttcgcacagtcaccgggaatttgtacgaagtacggagtagtctccggggaattattcctgcggcaagaaaagttagattgagttttctccgaggtcagtgcttggatgtgggaatggagaggttgagaattcagaagttgagaattctccatacacgtgaatcgccttcatacggacatggctactttcgctctacaaaccagaaaacccacacttgcacattttcattttgagatccacatatattaaaacaaatagaatggaatgattgaccctgaaattgcccggtagcttatcaacacacaaacgccgatgatgaaagaacagatgggaccgaagcccaagtcaaagaccagacaaagcaaatattggaaacattcaagcagcagctgcaaatcgcttcttgcgagcctccatggccgcattatccttctcactccatgacttctgcgcagtgttcgcaccggcattaggcttctttacgccggcattggtcctgttaccaccatcagcgcggtcaccgcggtcaccgcggtcgccacggtcgcggttgcggtttccatccccacgttgacgatttcggttgcgtccagtatcacgtctctttcccccacggccaccctgctcgttgcggttgtcgctgcggttttcgttacgtctcttgcgggagcgctcatcaggaagtgcctggtcgagacggcttaaacccgcagctggagtagtatcagcttcggcacccgtaccgaaccgcttagcgcgttccagctgctttgtagcctccttcaatgctgtgtcgtcatcctcaacaatgccaaacttctgcgcgcgagccttgcgcttctccagctctgcctccagatcggtctggggcagtcctcgcgtgtaatcgacggcaggcttctgttcgaccgcggcttcgggctgagtggctggttcagcaacggcgccggtcgtctcgaccttcaagtcgtcggtggtagcgggattttcgtcgagctgctggttggggacagcaacggggttggaaactgcgccctggccaccagcggcaatcgcagctgcgccggtttctgtggatggctcgataaccgtctctgcaggttcgtcgtcccagtcaatgacgtcctcgggcgcgtcagtcttggctgcggcaggagctgcggcaggagcgtcggatggcttgctctcatcatcttcctggaggcgcgaaaccatgtcggccttctttccagtgtgtgggagagaacgagtcttaaggatctcgaccaactcggcgttggtcttcttgctgtagtcggtggccattttgcgatcggggataggtaggctgcaattggtgggagggagagggtagaagcagaagtgattgtgataatgatcgaatcctgaatattcactgcaaaccaaatcttatacgggataaacaaaggaatgaaagttggagtgctgaaaaaagacgcccagagacgcgatctcacccagtggaggtccccaggtgcaagtacaacaattacataatcgaactagaatgatcccattggccacgtgggcaccacgcaataaagccagatccagacgccgacttgtttatttctcgagattattcttatattcaacaacctatattcttcaaaagagtacgatatccggatctaccgaggcagctagatggtgtggcatccttagaaatctagacgatgtttacgtccacaggttgtacacgatatatatatctagcgatagcataatatcgagggatcggcgctgaatacctatgtggaagtactgaaagctctaggtgaacatacaattgagactcggagctaaggaccaatacaatatgacgcctcttcaatgtacgctcgagctttgcaaaatctattttcattgccagctaggttgcttcatgcagcgatcaatacgccacactgcagaggctgttggagtcgagctggggattcaggcgaaggcaaagagcttgtcgagaatttaacaggcgctttaatccccgaatcagaggctgacagatgtacaacgtacgatgaaccacgacagcttgttgggaatagggatctgcatgcactgcgccacaagagaagcaggctactccgtacatcacacgccacattgtttcctcagacgtcgcatgagctactaccataccgttctagggttgttatcaagatacggagtacaaattagacgaaaagcacacgatagttcaattcgttcaatcgatcaaaggaaggatgaaacagaaacccaaccctgcgaaggatactcccgtgaccagtaaaagttgtgtcggttgttgcaagctcttccgccctcaagtatgtctcaaatttcaacatccttccgctccagtcgctctaggaatcggtcttttatcctgtcgagtcgactcaagatatactgcctgttctgccaccccaacgagagtcgtagaagcttgtcaccactaagatagacacgttgccaatccatagcatccactgctgggaattcatcactgcgtagacagttgtcctcaatgaatcgacgtctccagtagctgttcgggatcattggatgccaattcggaaacactaaaagcagggcgtggatgtcctcgtgattgtccagatgatctgcgatattcaagatgagttctgtcggaagaaacacattcctggtcttgaacctagcttgggatcgtcgggacattggatgtgtgggtatggagggttgtgatcttggctcaaatcccatcttcctctgcatggtgtactcggttgtgtatttggtgatcacgtcgttcaagcaggggtcattcaaaggatctgcgccgcgaaactcaggaggcatatgacttggacgcgcatcatccttggcacgaaatttctgaggatttagatacaagcctgatgttaaattgtccaataacttgaaccattctagccacagagggtatgtacctgttggatcaagcaatggccttgtgacatcgtatggatcacacattgcgtggaggaagatatccatattcttcttgatcaagtcgacgtcgagcattcgagtcatgagcttccagcatcgttcgtgcataggaaatgctactgaatatgttagctccgagacgaagttcggatttggaaaggcgtgttgaccatcgctttggtgattgcacaaaatcatgtcgttctcattatgtgggaggcttatttgatgcgtcggctgaagctcgccaacaccagagagatggaatgaggatacatcgtcgtacatcgtaaagaacactagcacaacgctcaaagttagaacaaatcgttcaacccaggatgttagagaaacacttacaagctcggagcatgcaagaccatgtccacatctcatcgaagtgtacgtcgtccatatctgttgatcttccgtggatccatggaccattcgagaaaccgtcagcgtctttcggtgaattgcgatatatgagctcagcaatatcagtggtcgaaaagctgtaaatattctcattgcatagattgcaggcagtatgttgatgcagattaattggccctggagggatggttgacactggagggagggctagatgtcttcttccccgtcctcgatgtcctcgcagtcttcgacgggatctttgacgggccatgctgcttttatctggatacaagagtatccagagagtgaggctgatacttgataaacacaaaggttccttcacggtgtagaaaggggatgaggaaaacagagatgagataataatgaggatatagattacagggagagagagagatggagagaggtagggagaggccggcagatagaaggatgtcacctgcaaattcctgaggcagttaccttagcttgagcctcttgacagctttgatggaaattgacagattataacaaacaagtatgcagttcttctcctttcaagatttctattattgcgatcctacgacaagttacggtagggcctaggacatgaaggatcccgccaaagacatacatgtgggttttggatactcatcaccaagtactgctagatataagaaagaacctggatacctcgtagcatagttcgagacttcgtattggaaagatggaactaatctaacattgattgtcgtggaatgtctcttgaatcctcatcatggctctaaccaacttcttcctgctgttcatccttcttgaagaaaggccctcgcttgaaataaagccttccaatctgcctgtattcatcctctcccttgtcaagtttcattctgaactccattccgtcggccaggaactcactgaagcagttcaagtaggcgtccgtccactccatccagtctcctaatccttgcatcatcacgagatcgctcgtttgctgctccacttccttgtctggctgggtcacccattcaaacaacttcaggttcgggatcatcatggcccagaaaggaacgtcgggtgggttaagttccccgctaaaagatgggccaggggcgacggcgaggatgaattggattcgctggatattctcatggctgaatactctcttgattgtatcttcgcattttccgtgcaggtagacttcgaacaagttgtcgccataaagtatgtccaagcattcggcgctcatttgtttggaaacatgtaaaatgccagtccagtgaggactggtgttgaggaacttgtcgtcttcgatggacgtgtcgcgcgtagaaaccacaggttcaacaccatagggccgatacattgcgcttgtcactctgatggcgcatttccggggcacgcagaagccaaaaatttccaaacgtagctcgaggggtagcgtgaagagtagagacaacgtggaagcgggagttggttgctcagactggtggtctggtggggtctccattgttgaacttgcaaggcaagtttcaatcgcttcttatgtcttggaaaagtgctgactagagagtttagcatcttgaatcgttggtccagcatgttccagcgtgtacttcatcaaccagatcagatcgcgatcgatctcgagacagatgacacggttttgagggggatatcgaaagatatggtaaatatagcagcaaatggataggtttcataaaagataggaatgatgatagtggtctaattggcagctcggccaagtggatgaatagcttggatgtggtggatggtaaagcaaagctgagttgtaggaagatgagcctgataaatagtaatttgtctgaaaagcaaacgaaccatctcctacggcaactgccttgggaaatcgtcctgcggcgactcaaggctccaacgtccagaggcttccaccgttcttgatgttttgttctaacgatgagcctctcagaaaatccccggtcattcacagcccaacagaatacatatgaactggctgacttggagtagaatctgtcttttctttgaaatacctaaataactgcccgtgctgctccaaacaatcaacgttgccatatggccccagcctaacagaactaggcgttcatcctcgaaagactcatctcattccctccgtgattgtaagacccttaatcacatgcgatatcccttgctttcttgaaacccctatcaacttgtcttgattacagcaatcggactgcacagtgttgtagcaactagggtcaccaagaacgacgccgataaatgcgagccgggtgatcgttataaatcccagtggttgtcactgttgtatccctaaaagtatcatatgatgcaagctgacagctggtcatcataccacagcgaaagtattcggccacaatccctgtccaaaggcattccatccctcttggcgtttcatccacgcatcgaagatgtgaaggtaagtgcgacgaagatgaggtggcagcatacggatattgcttatatcctaggagctgccgaggactgccccaataagccccgagattcctgttgataggccaagagctggtggggaggtgggaatgttgttcttgtttcttctttttagtttgttgtaggccggactgagccatatcggtattggatgcagaacctctgaaccacctgggataactgattgactgagagatatctgatttactaattataatatttcagaaagatttcactttgttttcaagataataaagaatcattgagtcttttatctcatatagccaatttggatatcgtcacaaagccggccctaatgcgggggtaacaagtaggctgtcatagtcgcaaattctgagtctatgaatactatttgtacctcaaatatctttatgtatggcatggattaaggagtttattaagctagcaaatgaaaagtctaggtgcttcacttttgtggtcatttctagcggcagacggtctaataatcagagggagtggtaacttgttggtagaagcctgtttattattgcttaggaaaccaaaagaaggtggaagtcaatacaatatactaagaacctcgtgactgaaataagattctaaacaaacatgtcatcttctccaagcgcccggacaagccgaacagttgatgaaaaggagttcgcgtcgaccgggggtagtgtaagcccagtgacacagtgcaacgaggcgtgtgcaagcacagaggccaagtcgcgaggtccaaatattggaataatcatgacgttctgcaatgcagaactaccagcgattaaactggcaagaacagatactacacttgatctaagccagaggcaaagagagctgaagaagaaagaaaagaagaagaagttctgggggcagggccaccttcttataggtatcctacgggcggtcggtttatgccactattcacaaatgaggcaaacaacgacataggctcacttaatgtaaatggtaacgtgatgataaacacatatgcagatatgcctagatagactatgtaacatatagatgtatgcaggtaggtgcctggtattgtaggaaccaggcttaagacttatactggattcatggatgatataaaagaaacagctcacggaagaagaatcagacgttcactatacacagggcttgtttgaagcagtagaggtaaaaaaaacaggcacacaaaggagaaggacaagacataatagcacaacgccatgggaagaaaacatagagcatttagtacacccaagccagcgtcggaagttccggggtttacagatcacattgaggaaaataggtggttcctcttctctgatttttcccctggcacaggcgaatctaaccatctaagaggatgccatggaaaggttttctttgggtttggtttttcttttttattattgcgttgccaataccgtttaccggtcaacctcaccgaacacaagatccatagtacctagaaggaattcaatgttagactggaataaaagacaacggaataaaagacttaccgataattgcgacagcatcggcaagcaagtgaccacgagacacctgatcgaaaccacccaagtgggcgaaaccaggagcacgaatcttgcagcggtatggccgctcactgccatcactgaccaggaagacagccatctcacccttgggggcctcaatggctgagtaagtctcaccaggaggcacacagtagcccttggtgaaaagaaggaagtggtgaatgagagcctccatgttctccttcatggcagcacggggagggggtgagatcttatagtcctccacgcggaccggaccggcgggcatcttgttcaggcactggtggatgatacggagggactggcggaactcctccatacggcagaggtaacggtcgtagcagtcaccgttgacaccgacgggaacatcaaactcgacctggtcataggcatcgtacggctgcgacttgcggatatcatagggaacacctgatccacggagcatgacaccggtgaaactcatgttaagcgcatcggtagcgttaacaacaccgacaccctgggttctggccttccagatacggttatccgtaagcagctcctcggtttcgtcaatgcggtcaccgaactgagtggcccactggtagatgtcgtccaaaagaccaagggggagatcctgcgacacaccaccggggcgaacgtaggcagcgtggagacgggcaccggacacacgctcgtagaattcctaaagcacccgaggcgtcagtaaataagacctggccgcagaggctttgcagctgaaaactactcaccataagcttctcacgctcctcgaaaccccacaggaaaggagtcagggcaccaacgtccattgcgtgggacaggacggacataaggtggtttaggactcgggtcatctcgccgaacaaggtacggatccacttggcacgctcggggatctcgacgttcaacagcttctcaacggccaaggagaagcactgctcattcgtcatcatggagacatagtccaatcggtcaaagtaaggcagagcctgcatataggttttgtactcaatcaacttctcggtaccacggtgcagcaaaccgacgtggggatcggagcgaatgatctcttcgccattgagttccagaatcaatcggagcacaccgtgagcagcgggatgctgaggaccgaagttgacggtataatgacggatcttgcggtcgatcccttcggccttggattcaaggccagcagcatcggggtgctcgggagcacccttgttggcgacggaggtgaaggtcgggtcggtcggcacaagtcgtgtggcctggtagctagcagcctctgcgtggcggcgaggaacagaggtggctatcgagcgggaacgaggaatggatgtgttgagcgaggaggggcggaggcagagccttttgggcgcattgcccgctaggcgggcgagagaagcggccatggaggatagaagtggaggtccaagagggaaaagaggggagatgatcctcaatccaggcgcattcaatgggtggatatggctcgctacggggtagggaactcactgaaggtctcaacctgggagtcgcattttggctcgtcacgtgaaaagccgccgggtcatcagccgtgcgctggttggcctgaaggggccactatactgtgtgggtaagggctccacactagcctttctttggtttagtgccatgcattgctcacataatcttgcgattatggattacataatatatcattatttgcgcataagaaaggcctcgtttctgcctcaggcgaactagaaaattacttcgagaaatctctcttatcggtgatcgcggattttaccatcaaccttcaccagaccctctacagttgctcaccatggcgcctcttgttccctcgcaggaggagctgcagcgccgccgtgtatgtctccaacaatgattccacgcagctcagaatactaatcgtcccagatcatcggcatcaatgcggaaaccgtcaccaacatcccctctacagattttcctggtcactggcccggagagtcgcatgggtgggcactcgatgaattcaaggaggtatgtattggaacatagttaggaaggtatactctactggatttagtaaatcctgaccatttactccaacagaatttccaagtcgaattccatcgcaatgaccggttcgaggcttccttctcgctgatcggtctcgacgcctcagtcgccaacgctttccgtcgtattcttatggccgaaatccccaccatcgccattgaagactgcttcattcacaacaacacttcagtcattcaagacgaagtgctcgcacaacgactgggcctgatcccgctcaagggttctgtcgagggtatcaactggatgcactggtataagaaggcgtccgaagacggtaccgaggaggaagacggcccctgcgacttcaacaccattgtgctccgtctcgacgtggaatgctacaagaacgaatacgcagacaaggacgagcaggacccccgcaagctgtacaccaacgcccatgtttacgccaaggacctcatgtacatgcctgtcggtcgtcaggaacaattttttgtcggcgacggcgctatcgcacctgtcaacccagacattctgatcgccaagctccgtcccggccagaagatcgagatggaactccactgccaaaagggtattggtgccgatcacgccaagttctcgcctgtggctaccgcttcataccgtctcttgcctgaaattaagatcgagcgtccaatcattggcgaggatgcgaagaagttcgccaagtgcttccctaagggtgtgattggtattgagcccgtcacccctgaagaggccgcgcagcgtggaagtggatacgagggccatgccggcgagcagaaggctgtcgtgaaggatgcgtttaatgatactgtcagcagagagtgtctgcgccacgatgagttcaaggataaggtcaagctgggacgggtgcgtgatcacttcatcttcagcgtggagagcaccggtcaatttgagagtgacatgctcttcctggaggctgtaaaggttatgaagctgaagtgcaaccggtggaagaggggtctgaccgatttgatggcttgatcaatgggtcttttctctgttacaccttactatatgcattctttggcgttggatttttgggctgcctttgcgctgtacatttacgaaaagtcgatcagtgtttcgcctcacgaggtggagtctagatgtgttaattgtcttgaataaaagcccaacagctatcttttgaattctacacatttaactaaggctaatcatcccggtcataagctatctgattgtcgtaattctcacatgagaggcaggataagattggtcttatttaaaatgaagacgaaagcggaatgtggtagtgtaggctggatcgctgacagcgacttcttcgccatcctcgatcaaatcggccagcttttttcccaagtgaggtcgggtcatttcctccagctgaggtgggaagcgctgatagagggtcttctcttcagtacgcatactaggcttcttcaattgggcctcggctctttccccgagactgtcgatgaactcccccagggtcatgttggggtccacatccatcttccgggcaagttctccgcacacgggacagtcgggctttttctccgcctcgaaggtgtaggtgtacactccttcctcgccagcatacatcatgtagttggaaaggaatggattgcagccagtggcgatcttgagcacttctgaagttgtggaggccgcaatgacagcgtttgttgatgcgatagccggaatgatatttttgaccacaccctgggtcatctggaaggtaacaccatggatattgaaatgctgggcacgttcgtaagcggcattgtatatccacgatatgtgttccatgttgtcgctgtcaaaagtatcatctttgcgcttctcttgccatgcgatctggtgcgcccattcaatgcagtgttgaggctggcgcgggatggtggcaatagtgcagagaggaactgctggacgaggtgcgtgcatatccagttggcactcaatgcaagatgagatagagggtagaatgacacgggcttggcccttgaaacctggttgacacatcagtaacatgttcttggctaagcttgatgatataggtgggtaccttcagttccaccatcaacaagtggcttcagactcgtagggtcgtcttcatcgaccatagagatcaatgtggaattgatccagcgtcgagcttcgatactgtccaagccacagatgacaatattgaactgcatgtaatagtcttcatctttatcctggatcttgccgacgtagggcgtgatcttgactccttttactcgcttttgcacaaaagcagcggcaacttcggctttgggctttccgatatccgcctgacgaaacagaaattgccgattgagatttgatatatcaatggtgtctgtcgactgtgagcttctagtcttggtattctgagttgaaacacatacccatgtcgatgacatgaatatctttgaatcccgacagtgcgagattctttaagatctcgcatcctaggccaccagctccgctagatttcagtcagtccctcatcttgagaataccacaactttgcgaggttgacaaacatcaccctaagactcacgttagcgaaagtactatccccggagtgaatccacttacaaaattttggcagattccaaagcattaataggctcggggccagggttccagtcgtcatctgtaaaagggccacgtttactcaagacattgtagaggtgcttcctgtggggtattagcgcagatcgaaggtctcaagggtcattcaacgcaccatcgaccttgttgatccacgtagatcggagtttctggggcatctgaggttcccacatccacatccatcttgataggctcctgttatggacaactggtgagagtaaataggcgcagtatcaagtcgcgttacacagattaacgcttgttgaggtggatggcaggcagagtgagcctgatgagagtgatatcaggagcagatccagttcagcttttggtcggatcaccaaagtattcaagttactgataatgaagaggctgagttgacagcatcacttgcgcgtgggctgccttggggtgactatggctgactaatctcaggcccgcctattgtaatcctcaccaacctctctttttccccgaagtgtattcgaatcgataatggaaggccttctgacagcagtgaaaactgtcaagcgagattcagatgaccttgttacacctgctgtcgaatctcagcttgctgatccgccagtaagaaatgacttcgatcctgaacatctatcatcacgtcatatcatagatctacttaaaagcagtcctgatcgtgaacaactgtctgccattttggcagcccttgatcctttcagcaaatccaaaacttcaaaggacttcgacctccgaattgcaagtcccgtcacagcccagattcttcaattattagtcagcatcacgattccagatcattggggatccctagatgcaaaagacagcaaagggaaagacgccaaatctcgagcagcattattgagatgtcttagcagcgtcgcgggtctcggttccttggtggctcagctacgatctttgatcaacgcggcccgtgcttctgcccagcaagccaaaggttcaagcagccaacttgctatccgggatctattggctgtgcttgctgctttgctggagccaaaggactttttagcccgtctttcttctgatatttcagtcatttacgacagcaaaactcgacagcaagtcacctggagagagcttgtatccctcgttgctgccggcaaggttttatcgacagcagccgaggctcttactgttgttgacgagtcaagatcagtatcttcaatctcctgggttggaaatggttcccagtatgcatcatggcttgggcgcaatatttcttatatggtggcacgactagccccagataatgaaagcgactgggcctcagttgctttgttgacagggcgagccttaagccttggatatacaggtgaatataaaatgatggccttatttgaatcccaggctgacgttgtgcagatcagattgtcaaagaaatctactcggatctacttgttcggcagtccttgctggcgcactttggaatattattagaccatctcagacggacggagcagcttgcagttttagaagcgatcttccgtgatgtacaacgaaggtacttttcagatgatctattgggaacagtgggtcagtcaatcactacttcagaacccattaaaggagtggcagctttgatctccgccgtcatctcttcccagccagatttggaaagtcaagttgtggattggctctcaaaatcgcaaggtggctcaataaacacgttgggattacgtcgtgcactattagctacttgcagcaagaacgatagtaagttcacgttgtcgaaggaaacgacaacggaactaaccgcaacagatgtgttgaaggcactgctcatacgcagccttgagcaatttggagacaagttttctatcaaacatgtcccaaatatggtccagaatggtttgtcaacagcccacagtcctctgctcctaaaatattagcctctgacattgaatagcaactgcacaagtgattcttcttgccgctggccacctctatcggctagatcaagcgcaagtgaaagaagtaggccggtcaggagcatatctcaacgcagtctccaatcgactcgccgcgtcctctaacagggcacgatttcttggcatggtcgttggaacaggaatatctgaactcattgaggaaccagacaaagtgctgaaatttgacatagaggaaatgcggaacgaggaagccctttggtattcgcatttgacaaaggtccaagatgaggtcggttcgcctgaatctatcaaaggattgcaagaggtattgccagaaaaaccagaactagtccaccccaagccttcacaaaagccaaaggcacaattctcccgccagcatacaagcaagattgttgcgattgaagaagtcgatgacagtggtgaagaggaagaggaacaggaagatgacgacctcattccgtatgaaaagccagacgacgatgcatacgattctgatgacgatcctacgttggtccaacggaataagccgacagcgcctgtgtaagtacagatcgcctgctgatatggatctcgctaacaaatctaagatacatccgtgatttgatcccatatcttcgagacaacgaaaatgtcgagcgctatcatctcgccatcaccactgccccatccttaattcgacggaagataggattcggaactgaacttgctgagcagatcgaggagctagctctgactatcgtgggtctccaaaatgacaataatcatccgtcattccatgaatctcgcctacagagcatgattgcattgattgtgtccgagcccttaaaaatgggccgctggtttactgccatctacttcgatggagacctttctcaagtccagagatctgctgttcttacagctctgggtctgagtgctcgcgagttagccggtaatggagaggatgatgccaaggcactgcatctcccaactactggcgatacctcattcccatccaagcggctctcgcctgccctagaggcgatgtactcaggagcaaatgagtctcctattgcaatgctcacccgggaaacggcccgcacatccttggaaccgctcgcagccaacgcagcagatacaatgactggccccaatgctctcaaagtgcgcactttctcatctcgtatggaagtcgagaagaaacgccagcagcgtgacaccaagcgccaaaatgctacaatcaaggatctgcacaaggttcttgccgagggtttcttcttcccactgcagggcagatttgaaataatgatgctgcagtcttcgtcgtacgttttacgtccactctcaaaatcatattattaacatcgctccaggtcctccacaccctcatacaacccattcttcatcccccatctccttacactcttcctccaaaccctctccctcattctctctacaacaggtcctcacaccccctttctcccaggcctcacccatgaaactctctccctcctcttatctctacacacatcctcggcatccagcgaaccaaccgtcactgccgcactcctgtcacttttcctcgctgtggtggatctcaatattgcgtctggctcaaatggcgagcagcgtcttgtcaccgaatacgccacccaggtgatcgagctgcgagagtgtgcttcccaggtcttcgaccggacgccgccttcggctgcgcgggctgatcctagctcagccgttaccgacccacaggagcagatacgcacccttgctgctggtgttatggtgcggcttggggaggtgatagagcggtatcagggtcggctgatgggtgttcattctggttttaactattaggcagatgacggaactatgtgaacattattgaaaatcccacgaacgagtacagccatcaacgcgccttggtcttttacatttcaaggaagaatgtaaatcgtgttgttccctttcttccgaaaatgacatacatatgtagctatcattatgatcgctgaggcgtagattggcccatttactccgccttgacaaagctacccttctcgatggccgcctccatcatccgatcaccactaatgatgctcgtggtacatataataatcttcctccgtggagcctcttgcgcagcaatgaagcgcaacgcggcgatctcggtgaacgtgataccacccaggaaaaagacatacacggtcttcgtagctgagttaccgctgagcgtttgacgagcccgcacagccttatcatcacccttctgcacgatactgaaagtcgcaccgcgagcactcttgacaacgtcctcgaagccaagccagccaggcgacgttgtattaggggtgttcgaggcggccggcgtacctcccttgatcaaggataccatataggatttttgtagcacacattgaaccaggcggacgctgaggggcgcaaagccactgtacacataagaaatgtcgttcggatccttttcgctgacctcctcgatgacaagacggaggtttttgcgcaggtacccgtagttcgtctttgatcctgcttgtgcaccggatgtagggagcagcattgtcgttgctgaggatctaggctggagaagttccattttctctagcgcccagaatgtgagaaggtgctggtggccgtacgcttgaaggacctgtctcttgaaactttctaggtcgcgggggcggagacccccagacatgcaggactccaggcacaggagccgtagcacagtcttaagtggaacatctcgagctatcagctcttcgattgtctcgtgctggtatgtggagtcggcaccggctgcattgttttgctggacttctaaagttttgcggaaggtttcggagcgggttagtcgcattatctcttctgcgaggttggtatgggttcgaagactctggtgctccagctggtacgttggtaatcggttgacaaactctcgaagctcgcctgtcgttttagccgtgtggcggctctcgtattcattttctaagcggcgagccaccttattcaggatatcgcccacgattgcaaagtttgcatctcgcagttggctgaacaactgatccgaggaatccagctgtatctttcttttcagcccctgcttgacttgctggggtgccttggatgactcggactgtggtgtgggagcaggaccgacaatgcttgtatcaacgtctgcctggttgttcttaataccgacatattcatcaattaagccttcataggtgagctgtgtgagaaggggtgtcccgaagtcgacgtcacggtctatgatgatcaagttctctacgctcgcacttggcaacaggcctcgtgcagagggatcagtcaatccggagctgtcctctgcatcaagttctttcctcatacgcaatagaagatctgctaagcgccgggcattgtccccttttccaacaatgcgtgggaaatagccatggcgctgctggacacccatgagagccttagcagaatggaagatacaccctggatctttgtgctgaataggatggtcagaaaatctctcaaatgttagcaacctatgaacttaccaagtacaagtcttcaaacgactcatccagttctaatgacaagatgtcttgttctagaggcataaaataaagaggaagctcggcgatgttcacgtcgccgatgattcctgcctcctccaagacagaattgctcataagcgtccgtcttggagcgaagaagatggaaaactcatgttcaacatttccattattctgcaagcgtttgatttgttctaagagaaatgtcagctcatcctgatggcactcaatcagagatagcaggaaagggccctaatgaaacaagcttggaaatgttgtaaaatagatatcgatatagggaacatttctccagattacatagagtagaaaagcctctgtataatctgatgatggcccatcatgggcccaaatgaaagagatccaatctgacaagccgacaggggggcaaaagagacaatgtcatacctgccacaattcgaacgtggcgagctttctcgccacgaacaaggaatacaacattgcgttgtgatgagtcgatgtttgcattttccagcaagaagacccggtcgacaccatactcttggagcacggagaacttgacgaatagacccactgggccggccagttcctggcttatcacgaggttcttcttaccccgggcctggagaatagttagcgcatataattgcttcgcttcgctccgcaatcagaatagaagatcaaggaggctgtgctcacgccttcgagtaaagtcaagagatccctccgcgccttgtccctaaaatagtccgcatccgaccccgataaaggagccatttcatccaggcagaggcaatgtcgtgagccaaaaataaacagagacgttgaagtgccactgcgcccgcattgggctagcactgccactgctgatgtaacatgtaactttggtattagtatcgttatcactgcgccatccaccatataactgggtggtaaatttggtacgccccttgtatacatattaccatcaggcggcgttctcgaacatctaactagctcccctgaaggcgtctcatattaattctttcttttgtctcacttcattctctttctccttactttcttgtactcccatttaccctcgatcattttaatcttattcaacaaatctttacagcactatacccccacccacgccatgggtcttttcaagaaatccgatggcgacgatgactccagccgccgagcactctttggctcgcggaagaaggacaagagccccccgaccccctccaacccttacgctcaaccaattccggtagacccatacactaaggccaagattggcgtgggtgttgcccccttacctgccgaccaccccgccgccaacggcggcccccactccatcccccccgacaacaagtacgccgccaacaagtacggaaaccaaggcggctacggcagtgatcgatttggcggacccggcgcaggcgccggaccctcaaccggaggctcgcgatacggaagcggtggttacggaggtctgggtagcagcgatcccaatgaccccgcggctgcagactccgctcgcaacgagcttttcggcggcgccaacagaaaccgggcaccggacaacgcgggcggcccatcaccacccccgtactccgagggtcagaatggtcagaacggtccaggaccgaactacggtggcggcagcaatgagtacagcatggcgaccttccaggatcgacagctgacagctgaagaagaggaggaggaagaggtccaggcgacgaagaacgagatacgcttcgtgaagcagggtgatgtagcatcaacacggaatgcactccgagctgccgcacaggctgaagaaaccggtcgcgccactctcgcccgacttggtgcgcagggcgagtccgtccacgacacagaaaagagtctggacatgacggccatcgaaggtcgcatcgcggaggacaaggcaaaggagcttaagacgctcaacaagagcatgttcgccgtacacgtggcgaacccattcacggcctcgcgacgccggcgcgagcgcgatgagaagatcctcaatacacaccgtgaggatcgtgatgtccgcgacggaacacggtccgaggcgcacgcgagtaatcagcgcatggaccggctgttccgtgatatcgagcgcgatgccgcgaaacagggcaagggcaagaaggcgagtgtcaccgagcgtgccaagtaccaattcgaggcggatagcgaggatgaggcaatggaggacgagattgaacagaacttggatctgctcagtggtgctaccggtcggttgaacggtcttgccaaggccactggcaaggagctggatgagcagaacagacatctggagcgtatcatgggcaaggtgagttttccctctaatcaggtgtgggtatgaagatgagactaactggctatagagcgactttgtcgacgatcagattgccatgaaccgggccaagctggaccggattcgttagtcacgttggttgttcaagacaaaagggctgcgatatgcctggtgctgtcgagctcagtaattttctgcgtacgttctgtccgttgggcatggatcacaaattggcgttaagctggttctgcattatctgccgtggtcatatcagacccggcgactagaatattagttgaacattaaataacataatttcattgattcattctgtacacttgaattgactatggcatagggaagtagccggaccgtgcgctctgtgacgcctttggtatgcaatatgagttggatatatcgtccaatactgccttaaagccttgagaaaccggagaagtcctgatattcagctcctcaaacctcaatcgcaaatccacgaagatcgacatcccaactgcgggggagcgcggggagtacccggagaatgaacctccaccgagccctaaatgtaacgaagtataaaaccgcactcccaccaaaaagcaacattaaccaacaaaccactacatctacaaactacattaaatccagcctacacccccccaccaaacccccatgcctctcccccaaaaaaccgacatcctcataataggcagcggcaacgccggcctcagcgccgcgctctcagccgcgcaaaccaacccaaccctccacataaccgtaatcgacaaaagccccctcacctgggcaggcggcaacacctacttcacagccggcgccttccgcacaacccacaacggcctcccggacctcctcccactagtcaacaacacggacgcaacccaagcatcccgcatcgacataccagtctacacagaacaagacttcaccgccgacctgcaacgcatgaccggcaaccgcaccgaccccgcactatcagcagcgctggtatccgactcgcgcgccgccgtcggctggctagccgccaacggcatccgcttccagctctccttcaaccgccaggcgtatgaagtcaacggccgggtcaagttctggggcggactcgcgctgaaaacacaagatggcgggaagggtttggtagaagatgagctgcgcgcggtcaggaacgccggcgtgggtgtgttcttcgataccgcggccacggggctggtgacggacccgacgagcggtgctgttatcggcgtggaagttgtccacactgacagagctggtgctggcgctgacacacacaggaacaagaacaggagaaccaccatcgctgccgacgcggtgattctcgcagcaggtgggttcgaggctagtccgcagctgcgtgcgcagtggctcgggcccggatgggacggcgcgcgcgtgcgcggcacaccatacaacacaggcgagatgttacaaatagcgcagcgcgatgcgtcagctaaaacagccgggaactggagtggatgtcatagcgtggcgtgggacgcggacgcgccgacggagtcgggcagtagggaggtttcgaacgagtatacgaagagcgggtatccgcttgggattatggtgaatcgggatgggaggcggtttgtggatgaggggtttgatatgcggaactatacgtatgcgatgattgggcggcgggtgttggagcagccaggacaggttgcgtttcaggtttgggatgcgcggacggtggcgtggttgcgggaggaggagtatcggggtgaggtggtgaggcggattgagggggcttcgttggaggagcttgcgaggaagtgtgtggatgttgggcttttggatcctgggcggtttgtgcagtgtgtcaaggagtataatgcttctgttgagggggtgggtgggcagaggaggtgggatccttctgctaaggatgggcttgctactaaggggctggctgttcctaagtcgaattgggctttgccgattgacaagccgcctttcctggctgtcaaggtcacggcgggtatcacgttcacttttggggggttggctgtgaatcctgagaccgcggcggtcacttcggagacgacgggtgatgaggttcctgggttgtattgtgtgggtgagatgcttgggggtatcttctacgataattaccctggtggaagtggattgacttctgggactgtgtttgggcgtcgtgctggtcgagcagcggcggagcgagctgggaagagaagactagaacggctgtgatgccttcgaagatcaagggtttacatatcagcatataactaatgactacaagtccaattaatgttcagaatgtcttctattgattagaatatatgtagtagcgacagtaattgactcgaccaaggccaggcccagccagtatcaaaacaataggaacatgttcttcctatgggtatcatcaccaacaaacctaaaattggaaacccatgcactggaaaggcgatcgaggaaagaaaaaacaatgtaatagctttaagccatgcagaaagcaggcaatggaagattaagaagcgaaaacaagtcagggtatggcctgcagagaataaaaacatcgaatcatcacaagccccatggtatcgagaaaaaagcacaaaggtgacgcccagtctagggaaagaataagaaatcaaatcaaaacaacgcatccagccggaaacctctatggtcataacgtgggtgaaacaaaggaaacatggaaatatgaaagaaaaaaaagaagctctctcttgcctgtcgccctcgaacggaacccattatacccataaatcacagaccgttttggaagggtatggtatgtataagcgtttctctctccgggaaatgtttgtcggaggtgaaatagaaaaagggatgaaaaggtgatccatgctgttgtacaaggagacgagaaagccggaaccgtttggatagacatgccaacacagttggtgcatgctcagacggagaacgagtttgtgaagggtggagattcgctttaggcgcgagggcgtaggagagggagcactcgacagcttccgtggaagatgtagtcgtatgaaagattggcagattactcgtcgtcatcgccagagccgggatccttctcgcccttgtggaccttcttgtgacggcgcaggtttgagacaacggagaagtgccgcccgcagccttcaacatcacacgcgaatgctggaaaatgtcagtatgattcgaatgatttagttctcacggaacaataaaaaaactcacgcttttcgccagtgtggctgtacatatgcgtctggagcgaagatggacgcgtgaaccgcttgtcgcagaccttgcacttgtgctttttctgggtgttggagggcatcttggagctgaactggctcatcatcgattgcgggccagggggagcactaccggccaaaaggctagtgggccggggaagagtgcgcgattcgtatgactcggaagttgtggagctgtagtcggtcacggaggagtcgacggagcccaccgaggcgctgtagtaggggtagttgccgccggaggagatagacgaggcggaggattgggtggaagggaaaccgtatgaatcggccgagcctcgcgtgccgcgaggaccggggccgtagatgttgcgcggagtcagatcctggctgagagcgaccattccgcggctggcgtcgagggcatcaccgaacgtaggggcggaagctgaagcgccaacgcgagcggcgtctctgtggattgtgtaagtctttgcgattccatgtaatgcagactcgaatcaacttacgagtgcgagatacggcggccgtcttgcgcggatgggtgaataggggcgtgggcgtaggcatagctggaaggtgcaaagctgctcattgggggagcgctggtgtaggaaggagcctggtcgaaagttgtgcgcgcaacctcgtgttgcattcccattacctcgggcccataggcggcgctcgcgtagctggacccggtcaccattgacggggcagacacggggatgttgggatagggcatggacatggcggagcggttcacttcctcctgcttgacctggcccagccccatgctggcgccattgcccatggaggtcgcatagactgggggggtcgaatgcgacgaactgtgtgcccacgggtctgtaaactgtggtggggtgtgatgatagacattgtcgaagctcatgccgccatagggacggttctgattttccataaccatcgtcatagggaatagagtcgcgaatcgatcgcgtgtagaactgtatagagagattgaagatcgagtccaaaaagtaatggaatagagtgatcgtctgtgttgatccggaggtatatgaagacaaagtgataaacccgatgatcaacaattattttatatttttaagggagaaagaaaaagcagaaacagtctggggaaggggatcggcgaagcttatgaaggaatataaggcatgatcccatactccaaagtgccactgacgacgtcccgtcgggggtcgcagatcgctggaaatgataataccggtatttattattttattatttttattttattcgaataatgtttttattgtttaaattgtttataattgtttataatttgagtttttcccattttaaggattttcatgactacaaattcgggatttcttttattttcccctctcgggattggtggacagacctggattagggcacaagtggtccgcaccagttcctcggggggacaattcctctggatattgaccctaagcatactagccctcctatttacgctttgtcaatcagggtctaaaatatattaattgcttaatcaactaggctgaggaatggaagatctaaagaatcggccatcaatgttgacctgggaatgtcccagatgactccggcatcggaacggccatcctacaggaaaataagcataaccagaaatattccctaagcttataatacgaaaaaggagaaaatcatgagacgcaaaaagcagtcggtgacctcagaatcaaagggggtgtagactaggggaatgttcaattggagactagccgtgatgaaggctgtgagtggtcgaactgtgccgtgtctgagagacaaaagcggaaggaaatatattttattgtgtaaaaacaaaacaaaagggactgccaagaaataaactcaccaaggttcgccctgagtccgctgtttcaatgtagcggggcagatcccagtgtcaaagggtatacccgttgccgtgggggttaatatgagtgatatagtgatagttcttgcggaatacctctattcgtggctatcaccgttagttcgagtagcttttatccaaactttgatttcagagacatggcttgagaccaaccactatcgtagaatagagtctccattattggcaagctgcaggatcagaggcacatgttctgattctttggaaataaaaagataaaacggaatggcttaagccatggagggggcctatgacacggcacagagagggtttagcgccaacccgaccttacatagagagaaggcagtatcgaatcactagccgccagcattattgactgtattctaattccatcgagtcagggaatccggcaaaaatgcgatgacgttggactaactcgagctcctgtttcagaagtcaactagttagagtagtcttggttttagttttcgttttagtttgagtatatctagatatatactgtaatccgatggcgcacacgggacagtctacggctacggagtacctcagagcaagtcccaaaacacaacattcatcacaccgtttagtttagtcctcgcagaaaccaccgcatatagatacagatacgaccgtgcaatgagctcgcccagcggtacaccaaaaaaaaaaagcctcctgcaggtagaaggcataagttccaataccaacgctgccattagccgggccatgcgagctgtatcacatagagcccgtcctgaagtccacgcctaaggcacccgggccaacagaaaaccccataacaacctcgtattgggccttgataatcaagagagccacgggctgcaagccatgttttccttttctcctgtattaggactggggcagcgacgtcagaggggcggaacagcgcaacccagtgggaaaacgggtaaacggccgctttggtcatagttggtgggcgccgctcccgcaataggtcgacatatcacaattatcacaatctattgacctttttttttttccccttgtggatttggaaatggaaatggtcatggtcatggcctcgtgcagtggaaccaacagattctcctctttctctccgaccaaattttcctattcaatagtgtgtgccaatacgcaataaataaatttccgatatgggtggtctatggtccccgaggctcggggtttgatgtcacccatagaaagttcaaagaagacatggttgatcactcaaggtacaaggtacaaggtacgaggggggaaacagatcgtcgaccaagagccgaggaagaggctgaagaaaaggcgacataccctagtcctcctccaatcacatagtcctatatccgtctccatcccatgattggcgtttagcccgggggggaggaagccatctagcgtaagaccgaagtacgacgtacatatattggacatcccgtactccgtaaaccacacacattcgaggattgattcaggatcaactgccgctctcccggacgagaggacaaaaacatgttcaaccgtgggctcggcacaacggagatctaaccgggaagcttaggagcagggagccaacacaaagcgaaaaaaggaaaagaataagcgcagttccaacttttcctctctcccagcttctccgcattccagtttccaaccatggcgacgccacgtcctttgccttttcgaaaaacttggagtccctacagaaaccatggaaaccggcaattaaacaacctgtgggccgtgggcaactatccggagttcggtcctcatccgttcacctctgctcagatgcagtatgggggtatccatggatatcgcggatgtgtgcctcgaaggcgaccgtgggtcccgggttactggattaagattggagtcgcgattagctttctaggtatgttgtatcagactacagtttatccccagcactttagcctttggatgcgaataaacatctctccagtctcgccatccttactccgtagtcccgtgtctaggcggtcggggtggacatccccccaaaagagaaaaaaaaaagaaaaaaaagagcgcaattgggcagtcagtcgggtacccaactgccatgtccacattgcaccaagttgaaagcgaaaagtgaaagggggcaaaaaataatacataggttcaggttacttcagcttcaaattgccccattctgaaaaaaaaaagcccagatatggagcccttgaaattaaaagaggcgcgcacttctcggtctcggtcagccaacccaacacaacgcaaaaaaaaagaaaaaacaagcaatgcaacaagatgggctggaggctgggcgtgactcccccttttgtgcatgccgtgtttggtggaccgaacaatctcaccggcagaactccgtctttctctcaacgaacgcccactgtgctggcaaaatgtggcgtttttgagatgctcatttttgaggtcgagagtgggtgggggaagggcccggaggggatgtgagaattagaacgtgtgggcgccaagagatggttttgtgttttggggtggatatagcttggttcgtcccgtatctgtatacgccgtacattggcaatggcgtccagtagttcaactttttgaggaaggtatacctgggccataatattgggccggggtgtgccggcagagctggagaatggggtcggctggtactccatacagacctgcagctctcggagttctataggtttgcactttgtacaggtccaccgctgcagaagggcccctagactagacagacacaggggtggagcatatctaaggtcgtgaacgttggaaacctgtgtgagaggacctgcttcaaggtcttctcgcgatgggccgtcaaggggggaagccttgacggccttgacggccctgaccgctccgacacggctcatattaatgacgcgtcttctgggaccctgagaagtttttttttttctgtcgtgctttcacggttttatctgcttttccgagaaacccgctggaaaattcagaaaagggaaaagggcggtcagagattgagatgtgacagttcaacacaggcagatcggagaaatagcgatatcaacccctggatttcgatctcagttgcccatgtcgagccgcttattacctcctcaaggacggagtacgctgtaatcagatccttatctcgcacgttgacgatccgcctcaatgccgagtgtcaatcaggtacccttggccaacaaaggcctgtcatctgcatggggctccgatcttggcagttcccacacggcagatcgtcatgtccctaattcaaggttgactgatcatcgtctcttttgggtggatatgtttctagtagtgctagtaatgagttaaaactcgataatgaggtaaaattggatagcgagtgaaaattcgaggtaatgagtgatccgatagtatgttcgctagtatattgtatttccccgtcacgctcccaatttctatacatagaactgaaacggtgaaccattcatgtccaaagcgttacatccagtggatctgtggatggcgacagacaatccgggtcaatgggacaacccatatggcatccacagcttagcatccacagctaggcagtccctttaaaaaaaaaaacaaaacttattgaactcggccgcccctgattggacgacacccggtatcccgataccggacccctttaggtttctttccacagtttcacactaatccggattagctcggcccagttgggcctagtgtggcttaattgcatggggtccacattcttacatgtttgctgcagagcctgccagccaatccgcagcgtccattggcaatccaggcccacctgaaaacggcagatagtcgatagccgatcttggcagtcgttgatcgaccaattggatcttcagccccaccaggagctgacgcgtgctcatcccgcgcttttaagccaacgtggttatcgactccttggtataggtcgaacaaagtaggaaggttaaccttggattgcgagacttggaatactcgggtttttttttgcaaccgtgatgagtatctttttgctggcttttctttggatgattctacatcgtaccccatagtcctactgacacaaacccaaagtcaaatgaccctcccccagcaccctccccgcaaagcccgttttggctttcgtccccaaactcgagatccctgcgtgcgatcctggttagactccacatttcccgctaggaacactgccactttcagggtcaacgctaaacaacctgaaacgcgagtggggggattcccatacgtacagtgactccgtaatttatattttatattgtcattcctttccctcctgttcgagagagagatcccaatataaactattcttgcattatcctccgtgatctaagccgcaccgagtaatttgtccctgccactagtctggaccagtacttattctgcgattccttatccattacgtagtggggctggtcgagagaatcggaacatggccggagaacctcggacatggcttgcgactggacggtctttagcgttgtcagcgtgagaccaagtgcgcctctttagcctgaagaaacggacttttgccttaataggcgattaactcgactgtttgatcggacctccccgccaccgaagaagaaactttgggccaagtcccatctctgcggttcttgttggagttccccgagaattgacggtggatattggagaaactgcggtgtgcgctgtagcctttccccattcctggactgttgtatcttatggtacaaatcaagcttgctgtctactccgtactcacatacaaccctacatcagatgcatgaagacaagaagtggggaaatcctctctcttggcctatgtcaccagacatcctaaacactgcaggaataccaagacctgagggaggggccgtagtcttagcataaatcttagtgtaccatagccatagcccgtggcccaaaaaaaaggtaatgccgatccaccaagtgtgtgtatccctagctgtgtgcctcaaccgccgtgatggggcgctgcagggtctccgatcccttgcaagattcagaatgttatagtatagtatagtcatctaattctcacagaacaatcatgtcttagctatgatttacgtagcttgctttttggtttattgtcctagaacagaacaataacaacgttccagcattgttaaaagcttccaatcatccgttgcgcaagtattctcctaatcgaaatgatctactacgttacgcaagtcaatcccgcagatcaacataaccttttttttccttagttatctttcctagtgtactccgtagactccgttctctttcacatgaatccaatctcggtatctcgcatgcttgacagctaaacatagttacttgcactttacatacagcgccggatctcgaggttggattgatgcgcgtaacaggccttccccacctctactatacactgcatgcccatatacatacgctttacgccttccaggtggggtcacctcgggattcattccctgcatgtgctactccgtacctccacgatctaaggatctatgaacctcaaaccgggacccatggtccttgcagctgtggtctctggttctgtgccgtgtccaccgcgctaaaagaggaactgatagcttacccggagatgctacggagtagttacggagtacggaagtactccatcgtgagtatgtaataagaataatcaataaactcacgtcctaaagcgggtagcagaccctggaaatctaaaaaaaagaggattccagaccttcccaggttggaacgtgtgcaaaccatggaaaagggtagaaaggggcgttacacaactgcccccttatcagggtctgtgtgttttctttttgacttcaccgttgtgtactccgtagggagtactacgagtacagtacggagtacatacagggaaatcaaatcccctccattccgcggtggttcagtgtgattggggatggaccctgaattcagggggaggctgtgtagtttgaagctacatactccagtgcttagttcgatatctgatatgttgtactctatacattcacattcgcggtagagaatgagtacgtactcgatttatattgaaggtatagtatacaacatacatatccacttacttccatagattattccagtctatactctatatccataatccatattagaataccacatgcctacatctgtactctgtatgtaacctcgatataaaaagaactaagcatgtacaaacgtaattctaaaatggagattccccacacgagccaagagcttacgcggccacttcctgcgccaagtcccttccacggcaagcttagagccattggcgattacatcgcctgcccctcctttttgattactttgtaactcctccggaccctgcgatgacgacttttctggttctggtttctattttttgtgtggcaaaatggggagagggaaaggggagggggttgcccccatattattctcttagctgaatggcttgctggatgttttgcgtaagtactaagaaatataggtttggacttactgtagttagttagttactcgtagactgtagtacttacgtcggataaatgacgtccttatactccgtaccccagactcagaccctgttgtttggagattagagatcttgttgacatcatcgtcggccttggagcgatccctgcctgatcggcccttgtcaccatgcttggctcgattattctacgtatgttatacaatctatagaaacgatcgactctacagaacggttgtttccgaattagagattaaagtcaattgaaattgtagttcgtatatcggactatgaaggagaaggccgttgaaccttggaatgatcgtacctagatagagatatatatcacctaccggaattacacgagagtaagcagccacaaagtatattttagatatctatcacaaacgcttggaatactatgcagtagtcagttccatttttgaattgatgtccacaaatggaatacagttacacttaggcacctcagcatgaagcaataggaaaggcctccgcttccatgcttgcaacataacttcgcttttacgagtatgtctgcattagggtgcagatatagtttaatagtttagtagataaggtaaaagaggttcccattaatattgcgaagacttaatattccattgcagtacatgagatctgatatccatcagaacgaaagaaaaacaccggctagcaaaaacgcacccataaaaatccgtatgaataatacatgagaaagcagaccatccatttacaacaccatccctagacaatgatggacagttccggtcgctccacgtcgccctccatgtccgggtagtaaggaaccatcgcatcggctgcctggacgtatgcatcgttgtagagtctccagtaaggcatgcggacctttcgagcagggtggaacaagccggcccaaacgtagttcataacgataccagtgccgaccgccatccggacggcttcgatggcttcgatgacccggtcgatgacgtggggactggtctcgaagatgttggggaaaagcaggttcagcagatggaccatggcgtcctcgcaaccaagaccgatcacgccgagtgcgacgtgcttaaccgcgctggcagcggtctgtcggtggacttgatcacgatcgacaagggcatcttctagcagcggcgtgacagcgtagacataatccttgcccatctcgccgatgtactcgaacaagaaggacaaggacttgagcacaccgttttgcacgttgagatccggcacccggtactcgttcatcagcgccgggagcacagtgaacggggcacaagtttcggccacgataccgatggcgacagctgtgcagacacgcgactgacgctcttggactcgcaagttgccgagaagagcggccaggacatcctgaggaccaatggccttggcaatgaaaccgaatgtgttgttggccgcccggcggattcccttcttgtgagccttgagcatatccatcagctcaaagcagatgcgcatccattcgcgggcattcacggactcgggaccacggtcggcaatacgaccaacgagatcaattgtgttttcctgcaccttttcgtgacggttgcgcagaatgggggtaagtcggggaaggaggtcgcgaatgggtggctgcatctgggtgataccgaccacggtgacaatggcacgcaaagcacccaagatggagcccagaacctcggggtattcttcacccaggtattcgtagagcacgataccaagcttgcccatgagtgcttcctcgtcacactgcttcatcaccagcgcaacgcgcgagatcagatcggctgcctgttgtcgaacagtgggggacttgttgttcaggcgccagagaatagtactgacaatctgagggatatatgccttgcatcgcgtgccaagtgcatttaccaccgtgccaaatccattgagaataacaaggtcttcgatgctttgttcctggaaggcgaagaggacaccatcaatgaggcgttcttccagcctctcagagatgtcagcggctccaagcgatgcaatcaatttttcgaccgtttccacagtcatcttgcgatatggctcgctttcatccttcaggttgttgacgacgcgctcgagaatctcgccaacacccactttctggcccagatccactgtggtatcgaccacctggcggtagtttcgtcgatcgagtgccatacgtcgcatccagaagcccttgaagaactctgtcaagacgtgctccttcaagtagccggcagtcacacctggagtgtttgcacattgagaaaccaccttcaatacgaccttcttcatttcctcatctggcgaggcgaattctcgaataaggatctccatgatttgagtggtgtagtagttggcatactcttcatccataagaggaatgatgtagccgacagccttgaggaaggcagagagacccttgccacgctgcttgcgggcacccgtccaaagagggcttaagatgtcatcgaaactttcaataccatatgggttcgcagcctccgccaaagaggccagagatagagcggtgacggtccgaaccttagcttgttcatcactgaggttacctgaaacgcatccaaccagctccttgagatgagggagaatggcgcaacccatgagaatagggatgtgctggacaatcttgacaccggtgtgtcgagcctgccaggacttcttactgcgacagacagcgcggaggaaaggaaggagggcgggaataccgagggcagaggccacaacggcaaaagcgcgtgctgtcgtgtttcgcacatattcatcggcgtggtcaatatcaggacgcatagtactgatcattgtagccagaccggcggccttggcaaggtttgagataatctctcggccttcaacacgggcatagtagtcttgatcaatgagcaatggttcgatgacgaccaagatcttatgaacatagggacgaaccagatcatcaagcttgtagaggattcggtcaatgaccttcaccagcaaatgacgctcctggtcttccagagtcctttccatgagcagggggagaatttgattgaaaagagcaccgggaccaaagtcgcgtgcattgtctgtgatctgacgcagagcagtctttcgcatgggtggggtaccgttcttgatcttgagcagcaatctcatgatcttccgctccttcatttcttcgacagtcatgctggtctcatccccaccctccatcagcttaccgaagtaggccatgtcctccgccttgaagaattgaagttcacccacaccggggatatcagttggaagatcctttcctacagactgaacagtttctggctcttgcatcatgaaccctccgacaccagcgttagaaattggtgctggagtggctaagatcctgcgagactgggttcgaatgggttcatatccgggaggagggtcaaggaccttgtaaccttgggcctcaccgggaagcatgatatcgagctcttcgtcagaccagccaacaacttgaccgggcataccaaccccaaaaccgactgcaggtgtagcggcacctgcttgagatggatgcatgggagtagcgagcccttggttgccaacgggggtagcagctgtgagagatggcgctagatcccatctcgaaggcatggattcgggttcctctttgggagcatcgaaacgcgatcttttctctggttcggtagaagaatcgccccatcggttctttcgctttttttcggtagccaccgcgacggtcgaacccgcctcggcgttctctttgtcctgttccacaagtttcaaggtagcctggtgttctgtgacgtcttcacccttctcgagcttctctgcgatcagctgtttcacgcgctcctcttccctctctacctcacggatggccatgacctcccggtatgtttgactttctccttcaacattcgcatgggcattggcagcaaagggatcggcgcgcgtcggggttagggcgccacggttgaatcggcgcttttggtagtctgtctcgcggtctgcgatccgcgccgccttttcgcggcctagcagaatgtcctcctcctcaacgccagttccttgcgccatctcatcaatctggcctctggtagcagtgtattggccaaccagtctgtgtcctccatccgcatcttccatttcttcatcgacatcaacggcgatcgaggtatcgtagcccgaaaacttctccgctccatcccgttcgtacaaaaaggtgtcgaacgattccgtcagggaggctttggttgagttatcggtgcgctgagcagactggtcaaaggtcttggagccctttttactagcagcagcagcattgcgctcggcttgaagccgtcgaacggcctcgatatcggctacaatgggatcagtatggggccaggctggggagcttgcgaaaacttaccgtcagacatggtgataagatgtaaaagtcgcgaggatatgagtgagcctgttttaccgcagaagggaacaccgcagctacatccggattgaaaaccgctgtaacggtcacaataatggtgattgaggatgctgtgttgctagccgcctcgtgatgaaaaaggtcgtgattgggttgcacgtgattcgacacctttgcttcttggattctaaggttgtctattggaatcacgtgcattgtaacgtaagcatgcctttgaaggcggtcaatgacgttggacatcgatgtgaaaggaatatgaaggaatatggcgaacatcctaacaggagggtatagcagcagcccaaagaggccaaaatgagaggggggatattgcttaagggaaatctcagcccctaaagcatttcacattgccatagcactaactcctttgagctaccactactaatatttgattagaagtcgttgatatttctacctagtagtgccattctgggctgttcactctataatgccttgtgtttgatcaattttaacacttttatgttctgagctgtaaatgtgttgctgcccgattgacactcaaaagttgtggcgctgcgagggcgcttacaattcatttatgtcctacaaccagtgtatcagggacattgaaggtctgcatggcctttgctgttcgtttgtacctgaaactaattgtctattttaggaaaaagcttcacatgatgggaataagaccaagaggctacccgatagccaatgacagatctaggctatagtagctgcttcaaataagcgcctgcaacactccaagcttccgtaatatcacttgattagccttccaaggctgacttatatagtagattggaaaattctaatcatacttaatctattctaaggttttccaacatcaaagcgactgtttgctgccggccggtaaacaacaacggtgctagtgtaactcttagagcgccgtggttacatccttttcattctaaccaacacatgaattaaaatctcatttctcatctctccagcaacctttcaagagaagtggcgttgacaacaaagaagccaatgctagcacagcacaccgttaccccggaattcagatggtatcctcagtcaacagactcggatactttcttagctgtatgcactatatagacaactcataggtgaatggtggtatccatttatatagaatctatcattggtcccctcgaaggcctattgaaccataatccactacgccttgaatgcggtttgccttgctacctgtgcggcaaatcttaaactccgagcatgtcctttgttatatatcagagtagccctgccaaatttttattaaataggatatctctccttgcatgttggtttatccttgcccttataccctggttcctattcacagccccagaactagatttgctcgagcaaattctaccatctttctacatcgtatagatccaaactactcgtccaccatgaaactcctcttagcgctgtcattgctccttgtagcggcaaatgtggaaggacattctggtcttcctcatcctctggctcttgcttcctcattctcccaaatctaccaccaacttgacaagatcaacctggggaattgctctctcacaaacgtatcactctcactgaacacgacaaagccaccgctcccagcaccatccacgaacttgactctcaaatacattgcattgggcagaggaacacagaactatacctgcccatcgaatgcttccaccatcaatcccaaagctacaggggctgccgctacactcttcgatgcctcctgcattgcatcatcgtccttagctctcctccacgaagtccccgcaatcatcagcgccactcctcttgaatctgtcgcgttcatggcagcccttgtagcccagggcacgagaagtaacaatatcattattggccaacattacttcaacgctgatggagaacctgtctttgacatgggactgagtggctccaattcctggattgctggtggtaaattagcagctactccagcgccgaactcaacgtcaggatcctccggtgatgttccgtggcttaagctaggatacaagaaggggaacggcattcaggtaagctcgggttgtccataatcggatttgaagtatacatatctgaccgatttatatataggaagtttaccgagttgtgacatcccagggtgatccaccatctacgtgcgctggtcaaaatagaacgatacaaattgcttatgccgcagaatattggttttacgggtgaatcgttctacatactttcgtgtttgaagctatacggtggacctttgggttttttacgacgatatatacgaccgcgagagcctttctaatatatgtatctagaactgtgtgaaaatacagttcatttgttggaatttcccgaaagacaagcttgccttgggaataaccgatttggccaattacattgatcactaggcaaaatagacatctcatactccgtgctgtggactctactgcttgatttctactatcatgtgcacgcaccaaatgttgtccaaagagaaatggttctcttaatgtcttaatgatcgtattgctaaagaataaaaaagtcctgaacgcccgcaagaaaaccaccattccacgattgagaccacaacgggccagcgccaggatgaatgcagacgcgaagaatcaagaagtacaatgtcaccaggcaacatgtaaagcccgtcgctcaaatctcgggggcggaaaagcattcatgcagaaaatgccgatgtaaacgtctctcccaccaacgcagaaccattcctatttcaaacacaccaaccagctccaacttggcagaagctgggaatttatacattgtcatcttcatagacaaagttgatgtcacggatgcgacggcggttggtggcaatgaactcttggtcaccggcgggtcgctcgttgcgagtgttagcggtaagcatgctctgaaggctcatgcaaacgctctcaacggtctgtactggggaccaaccggcggagcccaggaggtcaaggcagataatgccattgctgtagatatggggatgcattgggattgagcggggtgtaccagtggaggcagcacattggatgaattggacctccgggggttctaaaatgatcatgtgtcaaaactcggaatggtctgatcatctgaaagacgagacaaagacaagaggaatggaatagaccccgagaggaaggtacagacagaggctgctgagaagataaggcttaccaataggatacttgttactgaagacaaatttcaaccgataagtctgatccaggtatagtgggttctggtcaaggatcttgatgtccatctgccattcctccagattgtcgcacttgacgattgtaattcccggtgggacatgctcttgcatctataaggtcaaaggtcaggggaacacgtttataggatggtcaatatgcatgggcgctatggtatgctcccaaaatatgcggggagacaaaggcgataagaccaagaggaaaacggaggaaacggtaccttaatgagctcctatagttcatgaacagagtcagcaagatgtgcattccagcaccattcagattcagggtataatcaccttgctcagacgctttgtcgcgaacattgttgcgatatggtgctgaaagaaaaggtttagatgtttgagctccagtggagaaggaggggcggtgtctcgatttggtggagtagagcggatgtatgacgtcgaggacagaaaatgaagaacttcccaagtgagacgagaatgaactgaagaagcaaaggatatgatagagctaaaaagaagagatactgttaaaggatcacaagggacggtctaaaggcaggtggggagatcatctattgatccacgtgatattgacacctgactatattgggttcatagatgtctttcatacttggtagctctcattttgtcatagacatttcaagttgtatagttatacaacataagcattgagtttgacttcaggccagtttgaaacatcggaagagtgactagtctaaaatatcttaacagttcaatcacacatagttattacatagtcgggcagcaacgcaattacatatatcagaatacagtagcgcccgacatcgacttccatgtcggaagataatagtacaaactggcagggggtcaacgtctccgttttgcacctcggggttgcttctcatcatcgcagctgttccacgccacctcagagccggggggagccgagggggtcgatagcttccataaattaaagacggccttccttccttaactccttcacttttcctgccatggtgggatccttcttctttaagaactccacaaagctatccatcatatgagtcttcatagcatttagctccttccatggctgaatttgactcggcactgtcagccccgtatataccttcatcggatgttctcgcgcctgcagccagagattcgtaagtcccacagactgccgatttagcataggatagagctcgctccagactaggttacccatgatgcgcacctggcccgggtattccaagccttcatcctgggggtcttcactggcagtgccgtctgcactttcatttgtgacagtcttatcgaagtctggatcgacagccaggacaaagccttggaagtcccctttgagaagggctttgtcctttgtgatggaagcgtagaaatcgtcgttgatatatgagtttacgcccatgaaatcgatgagaaggaaaacagatggtgctattttattgttccactcttccgaggaccggatttgttggtagtgtctgtaagcagcattagtctcttgctcatttgaatcctgggatggaaagaataaggccatctaaccttcttgctgctgttaccggatttgctgtgtcaaagcctagttccttgcagtcaaaccaatgcagtttgaggtgtggtttgatctcgtcagcgccctggacgtcatcaccccatgccgacaagtgagcttccaagtctcgctgtagggttgcccactgctcatcggagaacttgtccgctgtgcgatagattgctaatccgaacccatagttgtctctttcccatggttgcaagctcaagctcgcttcctgcgcccgaaggagttgctgaatccagggctgtacaggtggctgcggcgaaggcgccagtccgcgtatcttctcacgcagctcatcctgtaatactgtactaatagaaaggcgctcgcggcgggccccgtcactctgcgtcgcacttggaccttgaacaatcgcagcctcgttctgagcctcgatacatttagtgactcggtctaccaggagcttggaaaacccgtagtttttgtcttggtgctctaggtcaggattgtgtagcccagcgatgatctcggagggcgcagtgtaaccgttgtacccatccatggacatccaaatattgaaatctgccattgaggtaacggcaatgaggtcggtccaccgctgcgcgagaattttcatttccgaggattctgtattttcagctgggatcgcaatcaaactgtccaatgtccgttcacgtaattcggcaacgcgggcgaggacccaggaatgggcggtgctggtcatgacttcgtactgtgcgcgaatatattcttcccagagagcagtaaggttgagctcgggagaaaggccgccttgggccttgcgccgtgcattcaaggcgtcctgaatttctccgaagtcaccagatattttgttgaaggtatcgcgcatattagtccggatctgaggattatttaggtactcaaagacggcaatgacggaggtcaggtattcatgggcgatcgtgaaatggtccgggttgttgagatctttttcgcgccaacgcgatgcggacacaggcgcaaggcctccccagaggcgggttttgacaaagtgaatattctgtccaatatagcacagtccgctcaagtcctccgggcccgtgatccgcatcatcgccttctgcacagttgggagagcggccttgttgaacggcgcaggcgcccactctgaactcggggtcatgaacagtgggaattcatctgaatcgattaaagctaaatcggtcttcttcccgttcggtagaataccatacgttatgaattccataaaattcaagacggcttgcggttcaatcaacgtgtccactgattttggttagcgaagtgacagtgacgcagtaacaagtgggaccataccaactactatgtcctggctcatccaatgtttctctgtaatggtcgatcctctgtaatcggcagcattggaaatggaagcgtttgggctggccgattcaccagaatctgtatgggaatatcgcgcgatattggcctgtgttacgcggcaggcccaaggcgcgaggttccgagcattgcgacgtgtcaccaagccagcacgggcactggtgttcgcaacgcgaggtgtcgtgcgggaagataacctagcgaaaacacggcgattaacctgaggcaggcttcgggaaagtctggtcgccatgatgcgttggatggatgtgatctgcagggtgcaggtaaatggcgatctgagcagataagcttgggctccaggggtaaaatcctcttttttcagccgcaacggaaatactaggtatagaagactgaatttggtgctaaatttttatgtctagtatactaaggatctgaaagtggttttatctagaaagtaaataccaccgtcgagcggttattttggatcaggatacctacatagcattgaagatcatgtgattagggtttgaatgagcatctgtatcgccataggatttgcattcagttcctttacaaaaccatcatacattggaaattcacgtagctgagcaatttggttcgggaaaaatgctcacaatagttgtctctagtgggcagatagtgaccaaggtctccgcattgagagagtgcattcgaactaaattattaagtacagagagggaataggaaaagaaagagagatcgaggatcaagaccgtgggttttgcaatgcgctcgcttgcacacttgggaaggagcatctcgcaagggaggaactaacgaccactcagaccgtaacacgggacatcatcttaaaagccttccaaacgattctgcttgataatatcctcaatatgcaaatcacgtagacgaaactcaactcccgcagccgaacataacaacccaagttccacattgaagttcgcaaagtggtccaacaaggcaggtataggacggggtttggtgttagactcctcagttgactgcatgacatgcatccagtctcccttgacctctaaataagtcaggtttgggcagcggcctcccgagagaaggtctttgaccgcctcaactagttcaggtatatgctgtgcctctagagcatcaaggataatgctttccagcgatagaggcaaaagatcactgaatctattccttactgtctcgttccggccactccaacctcggtcccagtctactatatgacatatctgtagccgaagttgcttcagcgcgctgaatcccgcgaatgatccgatgtattcatagccgtaagtcccataattggaataattgttggtgtacgcgtcggtcaatgttaacgtttgcaaggtctcccgatgtctttgtaatggtgggtagtaattcgccgcgtacatcccctcatcttctaggaaaggcgggatatcggcatgctcaaagataaaagattcgaggctcttggctgcgccgatgaaacttgcaaagcctcttcgagaacaactggacttgaggtggatatgagtgacattggagtaccgagcattatcagacccgtagctagccgtattgaacgcttgatcttcgacatctttctcgccatcaaatatcatatccccacaaaagcttcgtaacgagggaagtcgaaggattgggagaaagtgcgatgagctgaggccaccatctgtatcagaacatacgacagtgaggtgtcttaatttagataagccagagccttctttttcggcgattctagccatccactcgagagtgtagtttgaatattcatgaacctgtacaaccagatcctccagattaggcaagagggccagaagcaggacagtccacgcgtcatgactcccttgagtctgtagttcctggtcccatgtggataggctatcgtcaggccctaggattgatttcagaactggtaggataacctcctgttcatatcgcatgacggaaggccgcagccactcatgggagacacggagagtgcgcacttcttgcgctaatgtcggattaaatgcgagtgtgtgcgccagatgactcaagcggccatagtggtgctctatcaggtcgagcgatgtaaagactttgggtaacaaaagtggatagaaggcacggcaacaggaggcgagccgtaaaatatccgtgtggctatcaagatggcttgttattaagagcagcagctctgctggtaacgtagagagcatgtttctttacagcatagtaacggaaaatcgtgaatgcgagtgtatggtcaaattgtatggcaataaaaaataaacaacccgaaaatgacaatttgatgggacacaattaataagcaaatgcataggctaggcaacggtcacatgagcggtctgtaaaaagacatgtaaacaaatggtaacaatttggtttcgacataactagtgaacatgatagcgagtgaaaatctttgataacccaatttagagcaccttgagggttcagtacaagtgccttgaacgttgagtcggaaaaaaagatccaagtgcttgctacccttcgtggttgtatagtttaccaaaacaagaaattcaagcgcgatgattggttgggaatcacagaattatatccaagaaaccgcctggcagataaaagatagatacagggcaggataggcatagaaacagcgtatggacaagacgtaagatgtgaaagagacacaaagaaagatagtaaacaatttacgcagcagcagccttctcgcgagcttcgcgttcgatcttctcccgctcctcggcctccttctgctcccggaccttggccagaacaacttcacggaaaatagcaccacgggcagcacttcccagactcttcttcttggcgtggccgggggcaggagcggcatcgccgcttggcactgatggttccaccacacttgactcttcgactgagttgcccatgtccatggggctggggatgtcctccccatccccatcttcgtcctcgtgcatcttgagcgactcgatacggttggcgagcttgacgatctcgattccgcggcggagacgggcgcgcgcaatgtaggtgcggatttctggcagcaagtcgcggtcgctcgcagtctctccggtcagccatacgtgcttgagggcttcctcggaggtgacccgcttgctggggtccacattcaggagagagagaatgaaatctttggcgtcctgggagacatcgcgccagtaccgctcgtggaagatgatgcggcctgtccggcattcttcgatgaggtcggtcaaggtctcggatcggaagggggagtagccacacaggagggtgtaggtgatgacgccgagcgaccacatatcgacagccttgccgtggccctgcttgagcatgacttcgggagcagcatatccaaaggagccggccatgctggtcaatacctcagaggggctgtgcagcatcttcgcgataccgaaatctgccaagaccaattgagagtcgggggcacgggtgaggtagaggaggttctcgggtttcaagtcttcgcaaggattagtatatacaaagcgctaacgtgggttagggactgacctcggtgaacaatgttgcgcttgtgtagatagtccacggcatcaagcacctggcggatggtctgcgacgcatccttctcagtgaacttgccatactcgcagattcggtcgaacagctcgccaccagtggctagctgtgtaacgatatagaatttgtcctaggcccactattagagctccgcaacgatcggatttaacagagacgcgctcaccttagattcgaaccagtcgacgaaagagacaatgtggggatgtttgagcgactgcaacatctcgagctcatcgtggaccatgccctcgttgccacggacatttttcttcagaatgatcttgaccgcaaccttctgtccgtcggggccatctgcctcgcgaacaattccgtatgtacctgcgcccattgtccgtccgaatttatagagagccctatagccagcggaaaacaggtcagcgattgtggggtaatgggggtatgataaggagcctgtacttcttttcgtagctctccggctgcccggacagcttattgagcatgtttgcgactaggagagcgagcgttagtgaactgtggggcgtctcagacgaattgcacaaaataaatgacagaaaagacccctggaggagccgaccgagcggggagggcttagacatggcgaagcagaccctgatacaaaatgatagctagaagcccaagtcctcccagttcccatatattccacggggggctcacaagaagcgtgtagatcgccatggtatccaacgcagtgcagtcagattatagacaaggctgcagcgggagaatatttggccaaccccagacgacgaatcatagcaagaacggggaacagaagtcccacgaatatgggaatatcgactcacaactcatgatgtggggatagggctgcagacgcctaatgtagcagacgcggtgtgcagttggctcgaatggacacggaacgcgttaggtagcaacgactggaacgaagaagaggtctgaggatccaataattgaggctttttaaggaatggcccgatctaagagagaatagggtcagtgatatagaaaatatagaaataaattcgaggggtgagcgcgggggtggctgcgtgaaacaccaaacaggaacagagtaaacataccacactaggcagactgaaagatccgagatcgtagattcaattgccagtgagcccaaggagatgaatttaaaaaaagattccaaacaaaaaaagtgctggagaggggaagatcaggaagttctagacgcgataaggcttgcgggcttgggggctgtagggtttagcgccagcacagccacaacggggaatgttactgcctccagggctgacgagacgaattaatatcgacatgatgggaaattaggaaatactgagtaggggaaagattgaagacgatcaagatgatcatggaaacgaaagtacgatgtacattcttggagatgtcactatttacgtactccgtactatcgcgagaacccatggtcatatcaatcccctaaatagaatgcaagacccgggtatctatttagagtcacaccattcgaaacaccatccgagacagacaagaatgtcactgtaattgaaacaccatggatgattccctgattggcaataaatatcctgaccccaccgtatctgtgtggcacggcgtcgtcaccggacgtcataccctagccagaggtatataaccaccatatatttttggcgtgttcagctgagcttgagatttttgagatttaccatcataatatcctcaaaaaccagaatatatatatccaaactttcaatcatgctatccttcctcttcttcctcgcctttcatgtaattctacttactgcttgggtctctggttacctagacccataccagaaacagcttcaagagcttttgctggactatatgggcgagagcaaggtctcttacggactgaaaagtatgtcatgccaatgagagaaagaggcaaatgaattatgaattcatactaatctgagtttacttacaggaagtctcactggcaagaaactcaccgaggaccagaatctaagcaagattcaagatcaactcggcaatcaactgggtgacatgtttggaaaaggaggtctgggagagggattgggttctgtgttgagtaagggtctttgaattggccattggagttgaggaagtctggaagaattgttgcgcagtcgcccaattggtttgatgcaaaagattacgatatgaatggtgttttctctgttacagattggacaaaggtcgctgaaaacatatccatgaatttgttacttaatcttcaacatgattttagttccaacaatcaaatgtcttgctattcctgcccttgtcccaccgaaccacaacctagataatcaaacatagacgatgatgacactcatgatctgaattgatatccgcctagacggattcaacaacgcaacacctatcgagcaccctgaatcaaatagccccagggccaagaactgaacctgcatccacacctgcacgacacccaacctccgaaaaatcaaagagcaaacaatcaaagaacaccaacaaaagaataagcagcaaagtctcaccgctgcaaccagtcccgggatccataacctgtctcaccaagctccgccaaagcatcctcacaaaggttatcgtagtactcagtccccttccagtgactgtgcttcgactgaataccaatcctccaatcctcctccctgagccgcttgatgcgctgcgccttagtctcaacccgaataatgtttccatactcatcgagattaggcccctcaatcacaggaggttcctggggtccgccggaagtgctaggcttcacgggagaaaacgtccagaaggatgcagagcgagccatagtcgtgttgcgagagcgacgcgcatgctgcatgtccgaaacatgtttgatctccttgcggagcccggtaatgtcggcgggaatgtgctcgcggagccacttgacagcgctgttgaagttattgatctgcgcggcgcgttcggcgctgacaggcgctggagagggctttctcgactgcaacgagggcgagctgacgctttcctgccctggtgaggctgggcggctgacgaatggggaggcgagggggggcatcttctttcgcggaacgggggttggtgtcgatggagtcatggtcatgggcgaagggaagaacggagtcggacgctttggccgcggtgctcggattgaataactcttcttctctgtgttagcattcagatttccggctgggactattcccagggcagccggggagggcgagctcggccgggtcgaatcacctctttcatagacgtttgtggctctttgcctccatggattactattgcagagttcctacacatgtgcacttcgccggagctcttccgaattgcaagcggggatggaatgagctcgcgacgcttcactggatcgtcaaactcgactgggaacttgattggagacagacgcaatggtggccgctttggatcggcaaagtttggcggcgcacgagtcagaaaagggtcgtcggctgctgcaatcatggagttatcaatcatccgggcaatgtttcggacgatagatgccccgttgggaagtctatctctggcactgttaaaagagagcaattgatctctcgtagctgggcgagcaggagcctcgcatggtggtggaggaggaggccgggtcggaggagggatatgaaaagccgggggaggggcgtcatggtcaaaacgcaagacttctcgagcaggagcaggaggtggagtgatacaaaagtcagtggtcatagatgagcttgaggcgcgagagggagaaggggcaggtacaggcgcaggaggagtttgaaccatcctagcattaaaagcggacagatttcgaactgacagagcttcagcatttggaccaggaccaataacaggagtgacgccatggtccggtgaatgcgcaggactccactcgatagcactcgaggaagaccgggcagacaaggtgggagaatgaagaaaagtaactggcgagtaggtctggttgggattcaaaactggggctgggatagtagctggcaaagactcataggcagtctgaaaccgctccatagcattagtcaaaagcggtatcttgatagccgaaaatatgtgagcagttcgtcccatgtactcgtatgaggtggctgcataatagtggaggtaggtcgcactgatcggatggagctttatacaagcccattagttatcagaagagatgagatgaatgaggcacaaactggactagatgcagtctctatgagctggttgcaacgcatggcacattgtttgtattgctggttgaaacatagccatttcacatcggcgagggctttcttccattcgtaggcatctcgtggaggagaaaagacaccaaaaggcagcgaggtctccggtggcatttctggagtggaagccattttggaaacaaaaggaacaagtgaatgaaggatgaagaaaagataaaacacgagatgggatggaggaagaggacgaagagagggacacgagacgggatggaggaagaagagagggacgcgagatggggtgagaacgtagaagaaacaaagactggagtctcccaactcagagtttcccagacaagtccatttctcatatttgcccacgatatctatgccttcagtcatgtttaccagatttggccagctcccaggacactcaagcctaggcatagctccaagtgtacatcatttaccagtagccaggaatactgttcatattatcatccttaagagacctacacagtgtacataggaattgtagataacctggatgatttccgactaaagatatttactagaaataatatggtcatctagacctgctcaacaacctgaacaccattcgtctcatgcttgatctccacccgtgacaatgcctcgccagtagccgaaagcgactccaggaaatcacccagcaaacggtcaagttctgccgtcaccacaccatcagccataccctccatcagactcgccgcacttgggggattgagagccgggaaggggattggtcccttgtcttctggctgtgacatgaggacttcaggcgtgtcgtgtcgtgcatttcgtacggtttcgaacacgggagatcccggttctgagactgggcccgaagtcaccgaggtgggcgttgggggaattggaacggccgtgggtaaagctgtcatactaatttcgtatgaggaaaccctggagtgcatgttccatgcagggtgagattctttgtctggcccggggccatcttcgtcgggaccggggccatcttcgaccccggaagcctcatcttcactataaccggctaaatccatcatcgcggggagttcggtgtcaaagaattgactgcgacgaagcgagtttgcgtcctgtggggtggtgggacgatcgaagcggaagggatcgtaatctgaatcagaggtatacgatgccgcggtcgaaggacgtgagtcacctggttcacctggttcatctgttgactgtggctgcgactgcggcggaggttgaacctcaggcagcggagcccggagggtgtcatgtcgatcgtcgtagctttggctctcgggcacagatcccatgactgggaatgtccactgcatggtagctcgcttttcagcctggaaagactcctctgttgcgggctcatgtggaggaacttcctcttcctcttctttcggcttttcctcttcgtcttgaacgaatgacgggaatttccagtccatggtgggaggtcgaggaccagacggcacaaatgtatcttctaaggcttgatcatcatccgcgccgctatcagacgactttgagctattctcagaggagctcctgttcaatcggagactggagcgggtcgcgcggatagtgttcgcatcgaccaattggaaaggttgcgcagatggagctcctgctgcgtagtgtgaggcctcgaatgacccgatgtcgatatcgagaaaagttgatgtgacagaagagcgatctgtttccgcacggaggggaagatctgaagtgggctcgggttcgatggggacaaagtcattttttgtttcgtatttgtagctgggcttctcctcatcaaacaggcattccagtgccgctgcgcctcggcgcacacgttcatcgaaattggccttatcttcataattaagatcgtccccggaaaactgttcgtacatgtccagctcaggagaagcatcggtaggactgatggattgctccatctccgccagcgaggccgcaatttcatccaggtcaataacggagaatcttcgctcgaacccatctgttgtactgaaattccagtcatcttctgactcctcggtacctgggagttcagctgccgcggcaccgcctggatggaacaaagagattcgctggcctcctcgctgggaccattggtagtagtttctcaccaactcactcacggaggcggtcggatatgcctcctccgtatcggcaatgtacgggtgagcaagaatatctgccatggtgggacgagtatacggattggagtcaagggcgtaggcaataaggtccttcaggccttggctgtatgtatcgctgtccagtgatggcgtcttgcgatttagttggcgaccgatttgcattcgttcccgcaggcctgcgtttggcggattcccgttggcgaactcgaacagtgtgcacccatacgcccacacatcaatctcatgcccgtattgatgggcctctccacgagttgcaaacatctctggtggcatccagtgtggtgttccaatccaggtggatcgtttgtctcgctgtgattggagaacaccagcaacaccaaagtcacagatctccagacgaccctcttcatgaataaggatatttgcagctttcacatcgcgatgaatgattccagcttcatggatggcatgaagtccaacagccagctcacgagcgattggaatgatgtatttctcatcgagcttgtcgtttgttgcacgcatcagggtacggacactgccaccgggacagtactcgcagactagccacaactgagagtgaattgagatggcttcaatgatttcgttgatgtttttggcaccggaatccttcacttgcttcatcacctttgtttcatggatgaaatcctttatcgactcatctctgaaatctcgaagtgacttgtagtctagcgagtcaatatctaggactttgatagcaactagctggcctgatgatgtttggtgacccttataaacacgaccataggcacctttgcctatcaactcttcaaactcgtatggtgggacctcggttttcgcacgacgacacatctctcggacggccactccttgttcacgagctagcttgattgcctccaccttgtgcttggtgatggccgccattgcagaggatgggtctaggagatgagaagctcgatccattgtgagtgaagataagcttggaatgaactaggtgtgagataagataactgtaaaaatgagataggtataaaagtgagtaaacagtaaagatagagatgggggtggagtgagatgagttaaaagggattttaaagatatgcgactcggtgcggagttaatgattgaatgcggatggagtgcgtttgggggtgtgacaaagcagatgtttgagctttttaacaaaacgtttcaagattctcttgcgcttcggtgtgctcctatttctagaggcaagagagattatcgacggacgagtggagagacgaagaggtgtcttttggtaataccgaggggaatccgtaggtgtagagcaaccttcgaatatactgtgaaaagagtgctgttttctgatcacgtagctgatcggacggacccgagaggagtatgaggggaaaatggtgtatttttcctgatttgcgcgctcctgagcctggtcggaggtttcgagatccacttgttgtccctcgtgatagtcggggagaggcaactctccgcaagagctgggggacggtgaagggatctgagaggaaatcttccgagtgttgacgacggctgaagtgtcgttagaacacggccgggagattccagaagaactagttggtagcccactgttatcgagtgcagatgtatccgctttggcacagactctggaaggctcttgttctccgatcgggttgctgtccaccaaatcttcagagaatcgggaaatccgaggtaggctggtcgcggatttgatatgactgctggtgagtgtcgacgtattagcctgggcactgtctttgggtgacaatcgttgggtggcagaatagacgtgggagaaatcttggtccacaacggtttgatcgcgaccgggaggtcttgggaatgattcaagtagcttcttaaagctcccggtgtgatttaaagtccttgggtcctgggatgcttcgcaattcccttgggtttcaggggtttcgttgaggttatcaacagaatcgggcggctcacctttttcgctgtcatagactgatgagcatgggggttcaacagatccagggcgtgtaacgttctctgatgtcttatggtgttcgggaagctccggggactcgagacagggaggctcgtcgtccgttgcaagctgttggaataactcggatagtagagattccgaatcggcaccgatgagggaagtccactcttcttcgtagtgaaccaggtctctgccttctgaatcctcgggaaagtcactaggacgatgctggaaggattgtagacgaaaatgattcgcacgttcactggggacagtatgttagtcaacgagattcacccactagaaggaggagtatcttgccagagcctagtagatgcaagtctacgagcaagactagtagagctgagttggcgagattgatcttggctgtgactggcctctaggtccggaggaagcccagcaaatgggtcggatgagccgaagagacgaagcaagaattggtgctcacttggaggaaatccgagctcctcgatcaaatcgtggagactaggagactcgtcagccattctgttttgataattacatcgacggtatatcaatcaagctcagaggtcaattcaatgatgggagaagggtagaggggatgaaagcgattatctcgcgccatcaatgattcaggaacctacctggtcctggtcgcttatttaatcgaaatacaagccaccacctgggaaacccgaaaatcgagtagacaagccgagtctcaccatttgtctttccaatatggaatgctttgtagggacaaatggaccttaacaatgaactaaggcagatatggtatttcagatcccacagccaggttcatacacggcttcccactggtgtagtgtaagtcttgagatgtgtggatatcctgaagaagaagaagatgaagaccaactgccagatgttgttggcgatactgtggcacgtgatatatacatccttatcgtgatcttaaggagctgaccgctttgtgttattttaaagggagattgaagttttggctttaaactagctcactaggcctagattttgaggttcttccaatttcacagatgatatcagcaaggtctagtgtagaaccttagaacgcattatatttcattagatatattactcttggcactattcgatgattcccagccttaatggggatcagcatagattgcttatcgtgaaagcttatcgtaatttctctctttcagttgctgtccatggctgcgaatggttataaatgacccggtgagatgacacaagatatgattcaatagaaacactacagctagtgtgccctattgggggccagtcatatcatctatgataaaggctgggaaatttggagcatgataggcccaacaaatgggatctggtagggcgacatatatagttgtgtttgatagagccatcaaatcaatgcgcttaggtggttttaaacttcatcacaaactcattggtttgctgcatcccgacccatgctagaatattcattgggacttagcatcaatcctggtctttatatattccacggttgtgcttctaataacaagagtatcggtcacagccagggatgattcaatcgactttctaacggtaatgcagaccattcatgatagtagatagtctggagccgctacagcgtttatcgcctcgaaatataacacaaacatggtgacattgagcggacctaagattcattgccgaccgtccggaatgccacatcgatgctctagttatggcgtggtgtcttagtgagatgttagtgcaaaataattctttgagaagagatcgttcattataagaaccgtattctccctctttgggtagatcttagtaacagtgccattggacacagtacgaacggaataggcgttcttttttttttcagagacaaagcatatattgtatgcaaagaggcgcctagtatagagctaagaaccacgccccactacgtatgtcgatcagcagttaagcgtgggaatattttctaacttattcttgtactacggatcaccgggattttaattctagaagggtaaaattttatctaactaaattgacacaaaaccgatctgacttggtcacaataggactcgcttatcgaagggactctgagcgatcgggtggcccgctgggtcttcgagtgtcggggtctgtttaggggcatgtcggggtctatttagaggttagcttagagccttagacgcttataacgaagagacattacatggttatacaactctatgttatcaaattacggtcttttatttccaatatgagaagtctaaaccaaggcaacctagcacttgggcctgagctaacttttgatggtcttttccgtagcataataggtagcctttgcaagacaagcatagtgaggagccaagaggccaaaagaggccaggttacactctgcactacttcagagtattgataccagttattagataggtggactgactcaccagattattgcgttggctattccttacaacatatatattgaggtggctgccgggactcggcgccggaatactcgggttggaagacttgtcctggcttatagactgttttgacatccactattttgggtatagagtcaagtttttgacagacttgagcattggttttattagttttacctcctctatacatgtattgcactcccatttcttgtaatgtatgcaggtgggatgatttgatgcctggatgccttggtgacttagctgtccccactagttaatgcacggtggtgctgcacgagctagtggaaacaggtgaaaatttgcttaaagaagatgtaggagtgggattttcatttcaatgcgattgaatgttttaagtatctctattttggattatatccaaatatacatatgtatactagtacatagttgtatagctgtaccgtacaagatacattccaaggttgaccgatagttagaatattaataatgtgcattgccccaccttgatagaggggttttgggcaggaagtcaagtcattcttagaaaccctggaaacataaaagcgtgctgtgaatcataggctttgagatgactctttttaagcatttagtacgatcaaggatcatagctagagatataaaacgagtcggatgacatctctcgcttggggtatggctgtcaaaacgtcaccggagcacccacggatggcaaaaacagacaatatagtgagtcaggacatgccaatctgaaggatttgaaatcaagaaaaaagacccaaagtaattgaaaggaatataagcaattaaaaaacgagaaacggaaaaaaaccgaataatataaacggtttcataggcaaacaggccagtcagctcaaaacgcacaaaaccgggaggagaaaaaaaagtccccactttcgcttttctttttttcctctcccacttttccttcccctcttcttcctcttcttttcccctctatctctgtccaccaggagcagctgcacatagaagtttttgattcagcgatcgagaagtctcgatcctagtcatctgtgtgctcttcttcttttcttgtttatccaagttaaactaaggatcaaccgccaaaatggttaagtaagttgaccttgcttgagacctcgatgtcctagaacgtactaacaatgatgtgaacagcttcactatcgaagaggttagtatttgcctttcaagggttccaaggttatatcaaacactatcaccagaagaggagacatattccctcgatggctccttcaaatgcctccatctacctcccaccgctggtgatacttgaaaaacctttcaaccatttcccttgaaacacaacatcatcaaatcatcatgaatgtcgatactgacctagatcagatccggtctctgatggaccgtcgggctaacatccgaaacatgtccgtcattgctcacggtaagttcagacggcagaggaagcgatatggtgaaatggttgattctgactcggtctctgtgcgttagtcgatcacggaaagtccaccctctccgactccctggttcagcgtgccggtattatttccgccgccaaggctggagaggcccgcttcatggacacccgtcccgatgagcaggatcgttgcattaccatcaagtccaccgctatctccttgtacgccaagttccccgacccagaggatcttaaggagattccccagactgtcgatggatccgagttcctgatcaacttgatcgattcccccggtcacgttgatttctcgtccgaggtcactgctgctctccgtgtcactgacggtgcccttgtcgttgtcgactgtgtctccggtgtctgtgtccagaccgagactgtcctgcgtcaggccctgaccgagcgcatcaagcccgttctgtgcatcaacaaggttgaccgtgctcttctcgagctccaggtctccaaggaggatctgtaccagtccttctcccgtaccattgagtccgttaacgtcatcatctccacctacttcgacaaggctctcggtgacgtccaggtctaccccgaccagggcacaatcgctttcggttccggtctccacggctggtgcttcactgtccgccagttcgccgtccgttacgccaagaagttcggtgttgaccgcaagaagatgcttgagcgtctctggggcgacaactacttcaaccccaagaccaagaagtggaccaccaagagtgagtacgagggcaagacccttgagcgtgccttcaaccagttcatcttggaccccatcttcaagatcttcgccgctgtcaaccacaacaagcgtgatgagatcttcactctcctcgagaagctcgaggtcaccctcaccaacgatgagaaggagctcgagggcaaggccctcctcaagcttatcatgcgcaagttcttgcctgccgctgatgcccttctggagatgatctgtatccaccttccttcccccatcactgcccagaagtaccgtgtcgagactctctacgagggccccatggatgaccgcgccgccatcggtatccgcgactgtgaccccactgctcctctcatgctgtacgtctccaagatggtgcccaccaccgataagggtcgtttctacgccttcggtcgtgtttacgccggtaccgtcaagtccggtgtcaaggtccgcatccaaggtcctaactacgtccccggccgcaaggaggatctcttcatcaaggccatccagcgtaccattctcatgatgggtcgcttcgttgagcccattgaggatgtccccgccggtaacattgtcggtctggtcggtgtcgatcagttcctgctcaagtccggtaccctcaccaccgatgagactgcccacaacatgaaggtcatgaagttctccgtctcccccgttgtgcagcgctccgtcgaggtcaagaacgcccaggatctgcccaagcttgtcgagggtcttaagcgtctctccaagtccgacccctgtgtcctgaccatgatcaacgagtctggccagcacattgttgccggtgctggtgagctccacctcgagatttgtcttaaggatctcgaggaggaccacgctggtgttcccctccgtatctccgaccccgtcgttgcttaccgtgagaccgtcgctggcgtttccagcatgactgccctgtctaagtcgcccaacaagcacaaccgtctgtacatgactgctcagcctattgacgaggaagtttcccaagccattgaggctggccgtatcagcccccgtgacgacttcaaggctcgtgcccgtgtccttgctgacgagcacggctgggatgtcaccgatgcccgtaagatttggtgcttcggtcccgacaccaccggtgccaacttgctcgttgaccagaccaaggccgtgcagtacctcaacgaaatcaaggattccgttgtctccggtttccagtgggctacccgcgagggtcccgttgctgaggagcccatgcgttccgtccgcttcaacatccttgatgttaccctgcacgctgatgccattcaccgtggtggtggtcagatcatccccactgctcgtcgtgctctgtacgccgctgccatgttggccgaccccggtctcctcgagcccatcttcaacgtcgagatccaggttcccgagcaggctatgggtggtatctacggtgtcctcacccgccgccgtggtcacgtctacactgaggagcagcgtcccggtacccctctgttcatggtcaaggcttacttgcccgtcaacgagtccttcggtttccctgccgatctgcgttccgctaccggtggccaggctttcccccagtccatcttcgatcactggagcatcctccccggcggttctcctctcgaccccaccaccaagcccggtcaggtcgtccaggaaatgcgcaagcgcaagggtctcaaggaggtcgttcccggttacgaaaacgtaagtctttatcctcactctcgttggtcacagttactaatctggtcttatagtactacgacaagctgtaaaaatgttcacggtcacccagaatttcccttctgccagtcattcgtggaatctttcatgagattgatgaattcaatacaatttcttcggttcaacaaaattttattccctcattcgtcggtatttgcttcgatcgttccgcctttagaaatcaggacatgaatattgaagcctctaggtatcattgattctgtcctttcattgccgtttctacatttggtttttctgccgagggttttttgctttttgcgtttttgctgtagtctagcagccagtttcgatatgaaaataaacttgggtatgctaggcacagtggttcatctgtagacaagtaattgtaagcataaaaaaaatcagcgaaaccatgactccgatcgcaatggtagcttgaggagttgtgttgtcctatgtcattcaatcacgtgatccaccgagcctcgcgtttttccttcacaatcgcgctcctagccatatccttctattccctcacggttggggtgaatgcttatcagcttaaaataacctattctcaagcattgttatctgaaatacaagggtgtgattttatcgcatatacaattatcactgcacacgcaggcatcttcccgcgtgacggctttgtttaaaccgcatccctgcaatcatcgccactttcacttcgatcttttgttcgatccaattcaatcctcacggtttgaaattgctcggaaataatcttcgtcatgcagtttactgatgcagaagccgctgacgtaaagaaatgggtggtaaaaaaactggaggacatgtgagttgatcaggcaccagaatcggggactgagacccgtggattgccctaggggaagcaaactgagactaattggctttattctgtctttagctcggatgccgactccgacgtgctcgcagactatgttttggcgctagttaggtccgatgcgccagccgaggaaatcaagaagatctcggtggaaaacttggaggatttcctgcgcgaacgtgagtccatatctcaatcccgaattgtttcatacaactaacaactcttagacactcaaccgttcgttaccgagctctttacaacattcggtcccaaacaacccgcacctcctacgcccgcgcctgcaccccagcctcagcgccagccccaacctgctgcccagattcctttgtcacagcctcctgagaatgcccccagcggcccgagagctaccgtcaccccgggcagtgccaaccggaaacgaactttcaatgagggattccagggggagccggatcacgacgatagtgggttccagaatcgcgctatcaagactgcacggcgtggtgggcgcggaggtagtcgcggcgacttcatgggcggacaacatatgcaagcgggtcaacaatatcctccacaacaagcgggtcaactgtttcctctgcagcaacaaggccagcaattcccctctcagcaacaaggccagcaattccccccgcatcagcagggccaacagttccctccgcagcagcccggtggcttccctatgatgccaggtttcccaccgttcgaccccaatgaccctatggcagcaatgatggctatgcagagtatgcaaggtatgggattcccgccgatgccggggatgcctatgcccgggatgcccggtcctcccggtcagccaggagccgatcagatcccgaaaagcaaccagcgatgtccattctatgatacccaaggtatctgttacctaggaaacacttgcccttaccagcacggcgagggagtctcgaaagacgatggtaagaacaattcatttatcctagatataccattgctaacaatcgcagaatatgaccccaagaccgcgggtacgcatgcgcagcggggcggtgctccttcgcgcggtgaccgtggccgcggccgtggtcgcggcgggttcagcggacgaggacgcggccggtccgatttctcatcggcaggacctaatgaagatcagtctgttacgactattgttgttgagcagattcccgacgacaagttcaacgaggattctgtgcgcgagttcttctccgagttcggtaagatcaccgaggtttctttgcaaccctacaaaaaggtggctttggtcaaatacgagactttcccagaagccaaggctgcgtggtctagtcccaaggttatcttcgacaaccgcttcgtgaaggtttactggtacaaaccgaatcgcgatgagacgcacgacagtgcacaaccggaggccccagccttcaacaaagaagagttcgagaagcaacaacaagaagcacagagggcgcacgaggagaaaatgaaaaagcgacaggagaccgaagcagccaagcaggctctagaacgccagcgcgatgaacttatcaagaaacagcaggaggagcgggcccgtctcatgcagcgacttggaggcacgacagacacaaacggtgccaccggtggtggagacgctatggccaccgagcctccagctgacgagaatatcagtgctgagacgaaacagctgcgagctcaactggctgctctcgaggcggaggcaaagagtcttggtctcgaccctgcggcggacccttcagcgcggggtggctaccggggtcgtggtggcttccgcggccgaggcacgtaccgtggacgcggcgcttacgatcccaacttccgcggaggatatcgtggacgcggtggatttgcggctcggggacggggaggtgtactgcgtctggataaccggcctcgacgagtcgccgtatcgggcgttgagctcaactcagacaaggacgaggcattgcgtcagcacctgatggtaagttatgtatctttctaaccaagcaaagcgtgtactaatttgttgtgttctagggcgttggcgaatacgaatccatcgaggcacacccagaccagccaaactcggtcgtggtggcattcaaagagcgcttccaggccgagaagctaatgttctccccgtggaacatcccctccgtgggcgaggttcaactcacctgggtgcccaatccgcccgttgtacttcctaccgctgggtcatccacggaattcaagggtggtattggacaggacgaaccggaagacacagtcatgtcgtcttcgtcggtggccaacagcgctcctgcgcgggatatggattacgacgttgcggaggatgacagctggggcgcttaattccgttacttttcgtgtaccagcatcatatgttggttgtataggctgcattaagctatttttacgggatggacgttccattccgacctgttgattaaacaaaaccgtgccaaaatcgtagatcacacattttgaggaatcaactcaaccgtatacccatcctatccgcatcagcacaataccttaactcagggggccatagaaactcaccggatcagcaaccatagcaaacttctcaaaaaaccacgcataattcgcatgaatctcgccgcgcgcaatacccctctcctcctcccactccgaaagcggcaccgcctccctcgaagaaacacccacatccttcagaatcctaaccccaccatcccgcaacctccgcacagcagccgacacatcaggaaccgtgaaccccaaatgcgcgaatccaagatgcgggggtacattccccgtagaaatagcaccagcacgatccgcaccaccatcaactttctccgtaccatgcatatggaacaactccagcagcccgcacgtcttcgtcaaaacggggatttcgctcgtagtcttcgcccacgcggtaatgtcgtcttcggtcgtggctgatggcggcgggtgtccgaggtagtagattgtgaaggggccggcgttcatggtgaagattatgcgcatgcctaggaggttgatgtagaagtttagggagcgggttgggtcttggatgcgtagggctaggtggtttagtttgtagtcttttgttgcgggtgttggggctgggtttaggcttggggctgcgttgaagaggcctggctcttcttcttggggttggaggtggaggtttgttgaggacatggtggatggatgtatgaatgagtttggtggaattgaatcaaggtgcgcggggtatataaaagatatggattttatagaatgaggggctgtagtctgctagtaactagggcggatccattgggcctatcaaagagaaagaactggatatcttggaatagttcatagcgtgcatcccgagttgatctacgatagcgtgccgcatggataacttcaagagactacatctattgataaacaatcatatcaagacccccctcatacggcatcgtcacccgtcggaatccactgccctcggcatcaacatacgcaaagagctcctgatacctatccttcgccttgacagtattatcaacgatgatcacggcgccaggccggaaatgcggctgaacaagcttcagcgcagggagggcgagaggcgtccagactaggtatgtagtggttagcatatatgcccgctgctactatcacgactagacatatccgtataggtgcgtgtgtgtatgttactgcatcagcccaaggaaatcaacaccacttactatccaacagcaagaaatccacagtccccaaatcggaggtaagagtctcacgcagatccccaacacggagatcaatcacatcctcaatctccttgccagctttcgcccaatgctcacgagctatcttagccttagaatcttctttctccgtggcgatgactcgcggcttagtggtggcgctgacgcgcttcgcattctctgcgacggcaagcgctaggtagatggtgctaacgccgaagctggtgccggcctcgacggcagtctttgcgttgatgctgcgcaggatgtggtagactagttcgcacttgtcctggtccagtgcgatgaacttgtcgaccatgatggagtcgaattcgggactgcattgttgcggtaggttgtgccagtccacggttgattcttgggttagggatttggtgtgtaggtctttgaggtgggtcaggacttctggggaggctgtgacgggcgagggtgccattttgtattgtattggttatttgagattaggaagttgttatgttgaagtacgttttggaatgcttggggaaggtgattgaagaaactaaggactaaagacctagcaaacggaagtggggaagggtggtggcacgtcaaaaagccctcaaactccgagatccaagggaatcaccggccccgtgttaattccggtgtacgccctatggcggggaatttgtggggacaagaaggagaaagtgccgagatgctaaccgacatgactatgatcagtacgcctttgtccgatgctataatgatcattaccgttcaattggccctaaccgccgagagtgcaagcacagcaactgaaactccatactactgctctagcaagtccgcatagctattcaaagacttcccaatcaaagaaaccatctcccagatataatccgccgtaaacagccgcgcccacaacctggtgaccgcagcactgagccgtgtattagtagcgagcagccactccctcgaaacaccatgctccacctccataaccatctcgagcacgaaatctcgcaaccgggtctcctgctccgtaagccccgggtccggatccggcaccgtgatcgcctccagccacttagccaatagcaccgcgcactccagggagcacaaagcgtgctgattcgaccacagagccacctgcgagtgcgcgacaaatccaataccgagcttgacaggtgtgctgagggcatgtgcgcagtggagtgcagcgcgtgtgagacggtcgccgcgtcggacggcgaggttgtcgtggagactggttgcgatctgcacgggatcccaggtttgcagttggcgggctgagccgcagtctgcgttgagtcggatgtaggctagtcgaagcagcgctgctgatgtgaaggatagcgggccgttcgggctgagtgggtcaacggaggattcttggttgcgctcccagcactggcaccagcgttctagtgcctgttcgacgtgtacgagctcgggtgtgggtgccattgaagatggagtgaagcggttccgtcgtgacacgggcagtcggcccgctttcgtcatgagccagatatcttgcaggatggcgtggattagcacgtagccgccgagcgaagaaaaccgctctacattgctggttggtttaaacaaggcggaaagggcatcctggaactttggctcgccaggactcttcatgcgctctatctgccagagatctgagcgcggggcttgccattctttttcggtgctgggtagttcgagtgtgaaatcttcagtgagaatcatgggtgggacgtcgaacacgatagtgtggatattgaagaaacagaacacaattagtttcgtgcgcttcacgcattcccgtcgtatccagctactccatgttccgtcctgctccggtagccggttgagtcctccttgtcggacgactatttccattagactgcgaagcgacagcgcctcgtggtatggggggttgttgataaaccataacgacaccgaggtcatatacaataaagcttgcacagtttgcagggtaccaatgtcgtcggccgcgttgaggccgggcgggggcagcttgcccgactggaagacccggcgaacatgttccatagtcactggtttggcaatctgatagagacgaaatgcagtgtctggctcacggcaataccgtgcacccaatgccgccatcgctaggaaatacggtaaggtcatggaatctacatcgaaggtcgggatatgcacgattgggtagtgctcgtgaaaaccggttacatacccggtcaaacatcgggacagcgcatgtcgagatggcatcgatggatctgggaccacattggcgtagtcggctaacatattcatgaacttctcccggcattccgccgtgactggtacgaatcccgtgggctggcgcgccgcgggggagatgtgatgatatccctccggctggagggagggcagctgagtgtcatttcggggaagtacagagctggaaggagtggaaggagtattttcggtcagcgcccctcgatcagaagattgatcatattccggcaccggggagaagtgcaacggtgggaatagcgggagtggctggtaagccggagagaacggatgatttggcaaggggacgctatccaaaaacgaggtgaagtcatgagcttgatatgatgccggcccaaagccacttagagcatagccaaaatccgggccaggggatggggtggtgggtctttcagaaggagtgtctatgctggccaactgagtacccagcaccgggcggtgtacggctggcgacaatgatgtgaaatggtcgacaggcccttgtagagcgctaggattagattgtgcgtggttgactacagatgccaaggagtttaatccgtccaagggagaaggatttgcgggggaggtcgtgtgtgtgttattgctggctggactggcatcagggttgtgagagagacgctcatgacgagccagcagatccctagaatggtgagtacatggaactaatagatgtactgaaattatatatcgtacttgcgtgtaaaggccttgggacattgaacgcaaacaaacggtttctccttggtatctggggggatattagacggagtattcggtccgaggtccagaagacatacgtgagcgatcgtgtctttgaagatgctctagccgggcaaatgccctcgggcatcgctgacactgatagggtttgctattcaacattgggggtgaacatgacgtggagggttggatggtctcggggatttggtgcacaactccggtgagtctgacagggacattattccctggtgtgcccggttcacaagtacctccacaaatactaccacggactaggtcgaatcgagcagaatatcatgaaccttgtactggtcttgcatcgccaagcacttattggcctagtctgccgattcccacgatgattaatgggctgtaccgaatcggtgcaaatcccgaggtctccgaattggagaaatttcatgcacgtgaccgccaatggttaattgcctctgcggagtataccccgtattcgcatctatgaactcgcgatgcgacgctggaaccgtcatttaatactggtttctttattttactcttctaattctgaaatcagcaagtcttattctcttcaaatcatcgagatgacgtgaaacaccgtcaaaaaaggagaaagagctaggccttgttcagtagtcgatatgcctatgactacgacgccaaggcacgggcccccacgtcttccggatggagcattatcagttccaccaacagcccaactttgtctcaatgtactccgtacatggtcggacctagtattaacctgcaaagagtcgtatacatgatcaacaggatccacattagtccacaagcaatgtggttcggatgataatatcaaattggagagatgataatatttcggggtttggtcctttctccggttttgtcttagttggactccacgccctggaagcttagcttagaaaactcttgccaacgatcattctgatttactacatggcatctacaacgcctgactcacttaaaccgcaatcaacaacagccatggcaagaaacgaggagactaccaagtctctatgcggatctcaagatatcgaattccgctatctagagctagagacacccttaccgaccccatgcattactttaccacccggccccgctcagtcaccaccaccagaagcgcccagtctagagaaattcatctctccctttctgtggccaaaatggcgcaagtccatgatgacttatatcgcttgcggggtcactgcgctagcaggttatgctgcgggcgaggtcagtcctgcatcagaggaactaactaaattatggggggtcagtaccgtcgtttacaatttgagcatcacgattttctgttgtgggtttgccctggcgccgatggcgctggctcccttttctgagattaatggacggaggccgatctttatcgccagtgggattctcttcgttggtatgtattactccgctgttttactcggcatatgctgactttctatgttaacagcctgtttaatcggctgtggaggcacgccgtcctttgctggattgcttatagctcgtttcttcctgggtgtgggtggatgtatgtatagcctgctccgaatggtcgcattcaattgatactgacttgaagcctcacagcaacattctccactatggtcggcggcgtgatcagcgatatctatcatgctcaagatcggaacacgcccatggcgctcttctcggcatctgcattgttcggtactggcctggcaccgatgatctccggcgcaatcatctcccgcaccacatggcgctgggtgttctactcgcacgcaattgtgtccgctgcttttgtcattatcatctacttcttcttcagagaaacgcgcggcagtgtcctgctaagccgcaaggccgcaacgttgaacaagtactacgagcgactcgaagaagcaggccatcacggtgtaatactgccgggcgaagaagcgtctgaagaaaaatgcgttcgtcgaatcaggtggaaagtcaagagcgacgagcaacgagaatcgatcgtaaccatgatccagatctcgctgtacagaccattccgtaagtctacgctaaccttcagtccaccatcccctaatgaatgaaagaaaaactaacatcctaatctagacatgctcttcaccgaacccgtggtcttcttcttctccctatgggtctccttcagctgggcagtcctctacctccaattcagctccataccactcgtcttccgcacaaactacaacttcacaatcgagcaaaccggcgccgtcttcacctcaatgtgtgttggcaccatcctcatcactatcatcagtatctatcaagatcgcatcgccatgcgcttcggtaaaaactccacttctcccgaggccagactgcacttcgtctgcatcgagtccgtgcttctgcccattggcctgttctggttcggttggagttctttcccatctgttcactggatcgtgcctgctttggcgattggatgtgctaccatgggcatcttttccatttacctcgctacgtttaattacctcgctgatacatatcaccggtatgcgagttcggcgattgcggcgcagtcttgttgtaagcttttccatgggtcgttgatttgtatgtgatgatattttgctaacgtcttactcactaggtcggaatttgctcggtggtatctttccactggttacgaatgccatgttcaccaaccttggttatccagaggcatcgagtctgctaggaggacttgtaagttgtggcaattaacaccaagagaagaaatcgactgactggatcgaaatagggtgctgctttgactctggttccctgggtgctgatcttctacggacccaagattcgagctaggagcaagctcgcaagtgtaggtgatgcctttcattcatacacactgtttgagactaatggaatcataggaactcgcacattaaatgatctacaacgcataccaaccccgaacaagacaaagagtaatttaatcacagcattttagggtggaggattagagccaacgacatcatacatgcatattatcaactatccaggcctacctaggtagatagaccggtctgaattctcattacaacaaataaattgtcgtatcaacgtacgcttcctataatcggagcatggctacgctcagcaattcaaaaatccccacaatgctaaaacaatgtacatgatatgatccaccatgtgttccatgcaaaatcccgaaatcttagaccaaaacaatgtaactacctcgggcgttgatgccctctaaatggatgtgcaccatttatcccagagcgatacgatgcataccgatcttcatcatcgctatcactatccatctgatccaaaaggcgatcaatatcatctccagcatgagcttccagtcccggtttcctttctagcccacgaccattgtgagattcggaactttgggagccctgacttccatcggggtgagctccgttgctggaagcgtggaccgattcgttctggctgctttgcgtgctcgttggttgcagcgggcgagggctgaaacgataacccgagttctcgggactggacatgaacatcagggtttcaattgcgtcttgttccatgagtgtgttttgggattgggtgcggagtctgtagaacgcgttcggtgtgggtggtgcgtgtgtgtgggatgatgagagcgagggcgttcctggccctaggaccgcttggccgttgagtggtggggtgagtccgttctcttggtgcgaatggtgacgtcgatggtgggagatagggctgcggttggaagggttggagattgcgttagggctgggacgacggcgctggttatgaccatttgatgcaatgatatccacaggcggtgctagcttggggattggaaggaattgattagatgagtatgctgatcgcgagcggttatgactcgggaaataacgggaatttccgttggatgatgtttgggaatcttgtaaaaaatgcgtggagtttcctgccggtaatgatgctttgtcactcgggctcaatggcatgttgcgtgtgcgcagtgcggtttgaggggtggcttcacgcgactgtcgggcctgctctactttggcagccgcgtatgatagacgtgtacggatatggaccgacaactgggaaatataaatgagctataattcctgaatgagcgagtgggcgcgttacctgtgcaatcctactcccatgagctgacgagcccgtactctttgaacgttgtcgtgcagctccattcgcgtcggcgctgtgagctgtggggggatctaaagtggatttgaagtcgccggcggctgttcgtttctggcctggggccaagcgagcatcaaagttcgaccttgtgcgcgaatgctttggcgatggtggcggtgatatagaaacattgccggctttgatcggcgataacgagggttgccatcgatctactgaggcgcctccattgaccggctgtatgtgcggggcgagttgggattccaataactccggatccacccacggtatcgatgtatgtccattcaatgtatgagagttaccgaactctgtcgactggctattaccattggccgaggaaggaaagctggaaagagagtctgtgacggtgctagcggaaaggtctagtcgtcggccatcgcccgatgtatcgctgccgcgctccgaggattcgatataggctgggttcgagttaccctcgccgggagcggggataacgacgttcaagccatctatttgtagtgacaatggtttcggtttcggcgattgtgtggttcgcgtcttggctggagtcgttggtttgtgaggtacgggaggcgtcgcgttgttcacagagtaggtgttcgcactggcctccgcatggagcaccccacgattagacacagcattgcgaccgtcattcatgatcaagggtggggcgtggaagattaaaagaagctgggatagcgacaatcggcaaatacgcgcgatctagctttaatcgcgagtttacgcggcacaatctcaacactcaacatgcatgtcctgtctcgccaagtcaccacattgagagttgggccgggaaggtccgataccaagttaattagatgcaactaacagtcgagatctcaacaagacgcgtgggagtactgtgggaaccagaagcgtctgcccgatcgagtggcgatcgaccagtacgcgcgcaagggttgcgacagcacgaggcggtaaatggggttctccaccgtgattctgaccccggatgaagggctcgacgggggtttggaaagaagaatgcgagcagtaagaactatttttgtatatagatacgccacaatatgctagtagcaaaagcaatcccgttgagtagttggtagggaaggctggtcttagaacaacgcgtgtgaggcgcggtcacgtggatggtactagaccaatttcatctgattcaataagtttatttaggaagagaatattctcaaatcatcactatatggtcattccgatgtaaagatggccagagatggttgtaagtgggtttacaaagggctatacttcggactatgctacgactccaacatctatgagactacctataacacacaagtaaggaaaacccttagaaatcaaatttggagcttcaattaatgataaaatatacaacatcatggagtcatgagaaatatgctccgaacaatgactcaactccaatgacgacagacatgtcaacaacaactcaacggaaagtaaaaataagccgagagggatctaagccctaaagaaaagcaagaagaaagaaagacaaaagaaaagaaagaaaagacaaaagaaacccattcctccgtactccatatcaatccaggcatcagtctggcaggccttcgatacctctaccagcactgagccaacaccaagtcccctagacgatggccgtcgactttctcaggtacttcggagtcagatcacaagtgatccggtcgatatccggagtctgagaaatgtggcgagccacatgagcaggcgctggcgcctctgtaaggaacattagcatcaagaacaagtacattttgttgatgggatcaacttacttggttcgttggggccatgccaggcccccatcttctccttccagccctcatacttctccctgcagtcctgaagcttgggcttaagcttcggcttccactccgcctcatacctgggcttcaacttaacccagctaatagagctatgagtatttctttttggatccattggacagatggtgtacttacattgtgcaccccatgaacacaccgaaggcgaccacgatgagccccaggagaagcttggtgaggatgacttccttccccgtgtcaacctcgtatttttcagcccgaggagagagcatgttgtcgttgacaaggcctgagataggagccatgtctttctaattgttgtttgatgtttgggaaagatgtaatgaagtctaagctttgatggagcttatgaaagatggatgtagttggagagttggaaagtgaagacagggggaattcacgaggataatatagcccagctgcgagtgctactaagcttgtttcggaactcattatggacggagtatgaagctttgagatggtttccgttacccgatgcggtgtcgggacgatggtaatacctcacctactaaaccacattaagtaggatgaaccttcaaatcctgggtttgtttaggactttcctgcttcgggaacgctctgggtaggtaactttgatgtgagtcaggcattctactcctggcatcgggggtcaaccgacggcgagaagcagttcggtcattgttattccgtagcgaatgtagacagcgtgggaggaggtaacgagaataaagcctgggcaaacagtagtgcattcatgaaatagttttgatataataaacatccaacataatgtaggtacaggttttgggtccaaacgccatctatgcaaaagacccaagtagattaagacatgcccaagaacaaatagatcacttgcgcttcttgccgcgtccacggccaccagagtcttcatcggggttcttgcgcttcttgccctccttgcgccagtaatcattgcgctctctcttctcgcgctcggccttcttctccagaccatcagccaccttagcgcggtagaccttgcggcgctcctcctgcttgatggatcgcttggcctgcttctcgttgcgcagggtagtgagcttctgcatgaggtcacgggctttcttttcctcgcctccgaggacaacggcacgcttctgcatgtaggtcggctccttgtggcccctcattttggtgatctgcgacttgaagggaagctcggcggctaattgtcttggcacgcggagcgggttgaagtgacgggcttgtctttcaatgggcttgtaggccgagtctttaatttgaggggtggggatgccctgagagtgacggacttcaccagtcaagcgcatgccctgccatccattatcacccttttcgccatcgacttggtctaacaagttggtcacaggattgtagtagcgatggggcttgatggggtaccaagcacgcaggaagacaatgtcactcatcaaaatcttgtcctcgaacgtagcacggtaacagccatcaggtttggatagcgcacgcttgatttgaccgcgaataccagagacagtcttgatggatgcaccttcgaacttggcaatttcgagcgcagaggtgaacatgtccttgatgaaggcggtgttcttgaagattttgtaaggatgaccagtgagtttaagcttcttgacaatttctgtatgctcatccacgctctgaacaacaccagtggcggcaatgcggaaaccaggattcttgtttgagaatgagttcacacagcagaaaccggtgttgggagcgacaaggggaccgtagaaggtagcgaagcagtgcatatgttcaggtgtgtacttaagcatacggtttcgcgtccgactgtcggaggtgctgtagataggcatggtctggaagcgacgccaaccaagcgagaagatcaatggatcgttgctcttgagaatcttcttgtgccagcgatgtttcttaatccggatctgcacgtagccgaatcggtcttcagtaggtgagagaccaccaacgatgacagggaagcgagggttaaacttagagacaaactcgtagggtacgttttcaaggacgatacgtgcgtaggtgccggctttgtaaccttcagcccgggcgcgcgaagcagggtcgagtgtatcgaattcggcgcggttgatatcggcctgcttttgcagcttggccttttgcagatcgtaccaatcgtcctcgccgaactcgccatcaataccatcatgcgttccgtcctgaacttttccgaaaccttcacggtcctcttcctcgaaacgcagcttcagttcttccttctttttggcatttcgctcacgctcagcttcgaggtcagcagcctttccgggctcatcaccttcttcttcctcatcttcatcaccgtcttccttgataccgttgaaaacctcgccagattccaagtcttcgtaatcaccgtcgccctcatcttcatcctcgtcatcttcgtccatatcaccatcctcgtcatccgaggcaccgccagacagtttgccagtgatgaagcggagtttaattgattcaagcaactcctcgtcccgccacttccgctccagctcatcgtagtcgtactctggaacggcgcggaagtcggcttggtcttctttctcgttgtttgtcttcttgaagaaggtctcgccttcgtcgtcagcggttttgtcttcctcgtcctcctcctcatcatcggaatcttcaccgcgccatgttttcacgacatcaagtggagtgatcgactcgtcgtacatcattcttgacaggtcggtgactcggaaaggagggcgctttccatggagagacttggcattagcgagcatgttctccttccatcgaacattaccctcctcatcatcttcatcctcgtcttcgtcctcgtcttcatcctcgtcttcatcgccgctctcgacttcctgatccgagaccgaagagatagagcccaggtcagagtcgctgtcagcgaatgccatatcttcttcctctccaccggcatttccgttctgtttggccttaaagcgggcttcgaagtctgcaggtgcggacatgtcgagttcgccttcatcgtctgtcacatctttttcgtccatatcttcatcggcctcttcttcgctatcggatccttcggggatatctatgtcatcttggtcgggtacggctacgcgggcacggcgtcgatcttttcggcccgtctcgtcgtcgtctgctttatcgagggcctcaccaccacggaagagacgaacaccctgatcggcctcacccagcatcttgcgctcgccctgaaggccaacaacaaggtgctcgccaagaccccggcgttcctcatcctcctcatcctcgtccgagtcccggtcaaaggtattggtcttgatatcgatgtaaactgcatccttgtctaccaggacaccgcccacatcagacatgggagcgaaaagcagcttctggtgctcgccaagcttgcgcctgttcgactttcccgttgccttggcgatctgctggttcatgaagggagttgggcatggatcgggcaagccctcaatattggcaacagtcagatcaccaacaccaggaacatggactcgggcgccatgagaggggaagttggtgccgcgcaggtagccgtagagcgcgactgtgcgatcacacttcgggttttcctcgatctgggtaggcggcgtgatgtccaagaagcgatctgcaagcgcgtaagggtgcgagttgcgccacacgagcggacgagggtttttcataacggacaagaatcgcgaaaggttgtgcacttcacgatcggggtaacggccgtttataacaccagacaagtaaaagagctttgcgcccgcgtatagctcactccagaaacggtgcttcaggcgcttcttcgcgtccttcaaagtgctgtgcttcttgaattgatcaaggtgagtaagaataccgaagacgttacccggcataccggccgtcgataaggcgttcaaaaactccatggtctccatctcgaatccaaaatttccgtcaatcatgagaagcacaatatctgcgatcttggaaacatcgatcgcggccgcaagagaatcggaagggcattcgatgaaggtgagacgcttgcgcttggtcgtaacaacggtcaacgggccttgcggcgagctgagggtttgcttggtgtagcggcggatcagagatttgagcagagttgtcttaccaactcccggcggtccaacgatggcgacaacgactggcggagcctcctcgggcatacgatccacgagggggacatgaagtctcttttctctgacctagaggagaagtccgggttagcatcaattgaccggtagaaaaattccatatacatacatcatgcgatcgcgcagcctgcttattgagctttccaggcctggaagtgacgaatgcttttggattagcacctgtaaagaaaaaaacattgttagcatgggctcgacagcaaaattgcagttttattggaacgatctcgccgtaccctcaaatttcttcttctctttggcagggcgatgcgccctgtttgcctgctgctccatgctatctgtcaagaggtataatacctcaacagatccactccttttattagaaaaagaaagaaaggcaagcgcaatccaggtagacgacttgttcccaacgacggtcaaaaaattagcagtaattatttttttgccaaagcggagtagataaaccttagtcaggggatctggagtgtaacctaaggcatcaacatttatccatctggcctaaggcataaatccttatcagctacccttatcatttaccggcccgtgatcacatgtaccggcccggtggctccactccgagccatgccctacctcaaagactccgctgcttgagctttcctttagtgtggattactagtgttagattccgtgcgataacgctatctaacatctcttaaaaaccagaggatgtaatttccctccgcgcctatcatgcggggcagaagtcgttgtacccgtggacctaatctaaagtacaagggctgaccaagcttcgacatcggaaaacccccgatttcccatactataaattcaccatgtatcctgcccgcgggccctatgagttcaatgtttctccgtatctaataaacctttgtgtaacatccaatctctaaactaccccgccaactgcatataatgtctgcacgccggccacccccagcttacacagcaccacctgattcgggggttcatgcaacttcccagttgtaccgttcaatctccgaaactgcatctagcccctctgcacggatcccgaaggaatcattcactatcagaccgtgttctgctcaagcatgggttgtccctgccggccacatctgccgcctgaccactccgaagggaccacaggtgggcgacttaaacatctggaacgcaaataacccacgagagcggatgtgggctgcgcgtacccggcagatccacgccacccacgtctcagtgggtgatcgcctgtggtcgaacttgccgtacctgcggcctctcgtgacgatcacgggtgactcgttgggtggcgggcagctgcatgatgttcttggaccggatggaaagcggaacccggatgtcgtgttcggaactacgcagtttggtgggcgggtgcatgacttgatgggcactcgatgcgatccttatgtgaacttgctcatgggcggagagacctttgacttccactgtcattcgaacctgactcgttccgttgtcccgtatggattgacggagctagatgtccatgatgtcttgaatgtgtttcaggtgacagggttggatgaggaaggaaaatacttcatggagacctcccctgcaaaggcgggtgagtacttcgagttctttgcagaagtggatgttctctgcgcactatctgcgtgccctggcggtatggcaccatcctatacgaatgtctcatttcaatactaattatatgctcaggtgatttgtccaattggggttgggatgataaagaaagtgatatgggatcaacttgtcgtccgctgggtgtagcggtataccaactggcagatgacaaggtcctggaagggtggaaggccccagaaagccctaagtacaagggaatgcatgggatgcagatgcctccccgcgaagaggatggctatgttggacactagggtaagaatatgaaaataaattatagagtcgtctattgaagggttcttgtcgctacacatattgccccgcgattctttagatatgatgtcattgcctcacaccgttacatcaacgtcaattcccccctttacaacatcccttgtaggccggactaggattagtatttaggaaattataaagccattcaagcaagggatttaatgagaatctggctttcagaaattgagtttgtagaagccaccatcccatgtcagacaggcatgtatgaccaatcacgacattttcaagtagcacggaagtaccgaagtatacaggatacatactatacaacgcgaagaaaggtaaggtgaaggagagaatgagaatgagaataaatgattggagggtacctgtttcaacgcaccttcccctaaaaaaatgcgtagccttcccctcgggcccctctcttctataaattctatttttctttctacttttcctcttccctttctccacgttctccatcttgacacatatcttgctatttgaaatcatgcctctctacaatgtgagcttagcttgatcttcaaaagtatccggactaacatctccctagatcactctgaagaccaacgcccccgttgaggagctggaaaagtgtgtccattaccaattatctcaaatgccttgatactaacaaatgttttcagggccaaggccttcgccagggagaagggtggtgtcatcagacatgagtacagcatcatcaaaggcttcacgtaagtgtgctggtttgatctatactatcgaggtgcatgctgatatatggatcaatactagtgttgagttccccgatgacaccgttcagaccctcaagtctactgaacatgtccacattgagcaagacggtgcagtgagccctcactagatgtccctagtcaacatgactaggaccgaggactgcagtccttgtgggtggtccgctttatgattgaatggaaacacgacatgcttgatatccgggggttattttctttttctttcttcttgttcttttttgacaagatggcttgataccaattatgcgaccttctttcatccgccatgcaatgtacttctcatgcttatctatcttttccaggtattcatacagatgatcaatcttcctgaatccaactatcagattgaagatgtgcacagtgcgtatgaatttaaacttgaaaaagccctgtataacacccgaagtataaattcacgtaaatacacctctcaccggtgagatagcgactttggaggttcgtgctgatctgcagcaattggaccgatgatatccgcaccgccggtgcagatcttccgtcccgggctctgacttccacttatcttgctccctatgatctacaattcacaatgacaacctcaatagctagaaatatgccttttcggcctagtcgccgggctcttccaattgggcgacctcatatttgtcgccaatcgtccacgcagagtcaaaactgggctggtcgcccatttgatgtcgccaaagacaatgttgcgcagctggctgcgagtccccgtcggccgttgacacttgcggacctactaaagtcagtctgatatagataacttataccaaagccgaatcaaaatgtgctaaattcatatccatccctcagacacggccgcccaccattgaacaaagaggctctactagcctctgccaacttcactctctccctcctacccgcccgactagcttctcggatccacgcattacgaaatctccctttcatcgtcgtgtcaaaccctcatgtctccaaaatctaccacaattacctccattcgctctcgaccctcttaccatatcaacagcgccgcatcacgactctcgaagaagagaaacagttcggggatgtattggcagacctcgtacatacccatacaaacacaatcccggtccttgctcgcgggtttttggagtgcaggaaatatgtcagcccggccgatgtgacgagctttttggacacgcatctacgtgcgcgtatcggtacgcgcttgatcgcggagcagcatctggctcttcattatgcatctatgcccatcaacgataacccagtcgatggtgctgatgcacctgcgcccgagaactcgattccatcaaactatataggcgtcattgacacagctttgcagccggcacgcatcatccggatatgcgaggattttgttggggagatctgtgagctcaagtacggggtacgaccgcatttaaagattggaggtgagcccgaggcttcatttgctcacatccctgtacacgtggagtacattatcacggagctgttgaagaacgcattccgggctactattgaaaatggaaatgagcgtgagcccatcgaggtgacaatagctgctgctccagatgtgccaggaaatcacccgtcggtcccgaatgatatcgatgctggctttgagcttgattcgaagcttgccagcgccaatgtgaatgaaatcattgggtactcggccccatcgtctcagagtatcacaatccgtatccgtgaccgtggtggtggtattcccgccgaggttctgccccatatctggtcgtacagttttacgactttctccgatatggactcccagggctcggagaacggcaacatggatgccttgaataccatctctgcgagcggtggccatctcagcagtattgcaggtcttggttatgggctgcctctcagccgagcctacgctgagtacttcggtggcagcattgcagtgcaaagtttgtggggatgggggacagatgtttatctgacgttgcggggagttgggagaatcgactgagaaaagaaactgaacgacagtactaaataccctgaacaagatcattatttttggctagtacaaccaactcctgatacctgcatatagcattgccttctacatccttgccttgacggatggctggataaacatatctatgaaatccgagattaaagtatctggacgttgaacagcacccaatatccgaccgatctctgttgcagagaacataagtcccatgttttggaaaaacttatcttgtatcgcggctggtgttttgggatttcgcgcatgtcctacgggatactcaatcagtatttgaggcaacgaggacccatctttgagatggaccgtcattcctgcaccaatactcttcttgtccagatccaagtagtcctccgtgagcctagggtcgggctgcaccatgattctctctcgcagggcttcaagctcctcgctcttcgcccatgagctttcgtctaaatagtcagcagcctctggtgggctacccttcaagaaagccaaggtgaccacatactgaatgcaatggtcacgatcagcagcgttgtgcagcggcccatgtttattaatgatcaaaaaagcagcagcagtcgttcgcagatctattcgctggatctgtttcagaggatcggacagcccctcttgtcgaaatcgacgcgcttgcaaaatggctgcctccacggccgagatagcatgcccttctaccggcatacttttgaacagcacattctgtaccgtccacgatccaaatggtcgtggaaggataaaccccgcctcgccaaaagtccgttcccaaaacccccatggtttcgcgctcaacgctcccggcgaaccaggctggtcgttctggaccagtagagccaactgcacagctcttctcgccgcatcgcctgctgcccatcctttcctcgggatagtattttcgccggatcggtacacccggtttggatggccatccatccaaacgtgagaaatagtcgccatggcttgttcatctgtcatcccgagcaaccaacaaacaacagtggcagaagccaatttgaccagcaccacatggtcgattccatagacattgaacgcattccgcatttgataacatccctgtatctcgtatgccttgaccagcgcgacgagcagcgtctgcatcgtcaacggcggaccatgatgaacccgtcgaccagacaagcttgcacgcgacagccagtccatgactgagagtatagctccgatattatctacaattcaatccatatcttagtctcacgagcacaatttccagccccatgtcttcaacaagccatacctgaaggatgtccccactccgcacctccaagcgcatcattatgatccaagtaccgaatcaggacacccagatcgaaagcccccttgtccggatcgacctgcaactccgttcctggaaccctgaatccatccggcacgactgtgccctcgatcacgggaccgagaagctttcggcattcggtgctcgtcgctgccgtctcgatggcgcagcccattgcgtctagcagggctgtccgtgcacatttccaaatcgcttcgtcgtcttggttgagggagtaatggtagacatagttcactatgtcgactatcggttggtcgtacgggcgagacatttatggatggatgcgtgttttagcggtgatctaatttgttacgattgagatttattggcattcgcaatattatatttcgtgtagggcacatgtagaagtcctcggtggatttcctagaatgatccggtcgtacacgtcggccttgttcaatgccaatatcgaatgtttatttgtcttagggttactcaaacgtatgtgacttggtttatcacggcgtagctattggctctactaggtgccgtcgcggtccacacttgtcagcaacctatagaatggaagggaacacacaattgctaataagtagtgtaattaaaaatctctaaattgcctttttccaactgccagtaccaaaaaccaaccctagtagttgaatagtcctatacatgacagattgaagacaaactagacaaactacctaagcattacggcgggatggacccgattaggcaaagtaagaagctagttccatggtttcaaagattctgagagaaccatctatcatcgctttcgttcattctactaccgctatcacctcacctcgatctgcgtgagctaagcatctacaacatgcagtcgggcctcgatatctgctctctagcggtatctcgattatggggaaggcgtcttccaccctcagagttccctaagctgaatacgctagccggtcttcctgtcgagctattgttatcaataaccgacttcctccctctagatggttgggtttgcatttcactctgcaatcgccgactcttcgccatattcaaccatcgaatcaattccgcccccttgttaggagttgacaaactgcctgttctactccgactggaacgagatctaccaccgaattactttacttgccacatttgccatattcttcataagtatgatgactatgatggctccgaatgcttcggtctatctggctcagtttacgacctagtgtattgtcctcttccatgtattaagaaatggaaagaagggcctgctaggttagaatttagattgagtgaaccaggaccgatcgggttccatgtgtatcatagggtattttttctgcatattcagcttgctatgaagagatgctgctatggagaaaagtatggaatcagcactgaagcgttatcttacacccaagttcgaacttactccgatgaaccagaattcacctctctcttttcgaccgacgcgcatatgcatccagagatactggggctttgtataagaacacaacatatggtatttgttcactccagcaaaccaaagctactactttctcgaccgaaaattaccgatgcgaaagatccttctgagattatttatatttgcacgcatgtttcgcgtctaaggcgtgctgaactacttgacctagtggtgaacgcttatcttactggagagaaagcccctagttacacttttacgtgtgaaacatgcaatacagtttgcttgattgaagtttgtgaatatggatctgatttggctctagtccttacaacgtggattaatcttgggcctgttctaaccccagatgaccctcgatggaagatctattgtaattcgccggatgcttctgaagtgactctcgatccaaatgatctgaaagatagtccacgggtcttgtttgaaaatgtgtcgcctcagtcgttagaggccttacggtcatgcaacctttcctatctgaagggccagcgatacaagaaggttatgagcctactgcattggcacaaaagcatatggtatctaccaagtaatgacttttggggaagtcattggaaatacggacgaacccacctcgctatcatatgctcatgtggttatttgtctgcttgcttccttttaacctgtcttattattgccatcgtacattattatggctaaacgagaatgttggttgtttacaatgttagcaaaatagacctattaaagtgacctctagttcgagtgggcaaatagaggctgaagacatctactaacagattgaaaagacaatgtccaaaagaatttaaaagacagcgtgcttgcctgaatctacttccctcgctcttgcctagtttcactccgaggccttccttcccataggcattctactactataacatcactttattatcatctttctatcgatcttttttagggtcttttagaatataaccgataacctcagcctttctttaccttctgtgaacttgattttgcaaaatcacattacgatcagattactctcacaatggcattgttccttgtacatcagattttcatttcattctaggcctcgacatttccgcgctccttttcgcggactggctcatcaacgcttgtgtccgtccagttacttgggtgcagctgagtgattttttcttttttatcatatctggtctctttctccgtgagtgagacctgctatcccaagctctaaggcaaattgtacggtgcttacctttgacacacacagttggtcttgagacttactgcttgcatcctcggttgccctgcttcttgcaaggaagtgcagatcaatatgtcacaaacactaagccgggaaaccaccggagtgttaggtgcccgttcgattcaaaagaattgagtgcattttcatcagaatgctaagtacagaaagggaaaagaatagggagaagaaaactatctacgagttccgctccctaggtttaggcgagctctttcagcaaaccacgcaaatggtgattctagcttatgttctaggaagagcgacttcctccataagtggaaagtgcatatggccgcggtacgttcagtgtccctaccctcagatcgtcccaggagaagcacacaatactaataaagtactagcccataatcagaattctcaatctcacaatggtactgctccttgttcagcaaatcttcacctttattctgggcgtcggaatctccgggctcctctttgcagcggcctggctggccatcgcctgtatccaatgcgtgccttggaacctggatgtcatagattataagccgggaaagcactggagaagcacacagtatcaataaaattttaggccaaccgtctgcagaacataaaactgcagatccccactggacttacggtgtctgtggagtaatctggggcgcacacagcctcatcatgcagcaaggaaattttggaccagcaaaaggaaggaggccatcgagataggagtataagctgggggcgaagtcactgccccccagtaagatgtcgctgtatttgggggggacaagttaaaactgatgcaagtatacagtctacgtgactgagaagaggagctactttaccaatgtataattttgtataggatatatggaagcaaaacaagagatattccgaaactccaataatatttatttagtagttatgtggctctacataaacaaataacctttagaatccaccaacacctctcactcgctgtacagcgccaatggctcccctagcccaactgaacctccgcttttcaggccccattgagcccggcggagtctcgtcggtcttcgggtcatgccagcagccatccttggtacttgcagcgccgtatttggcagtattctggttacgatttatcaactccgtccaagcacgacaaacgagctcagaatcaataagcacattgacttcctggctgtggaagaatgactgggtgtcgaggtttccattgcctagaaagatgattaaataaattaaattgtcgtaatgggatctgggacttaccttgaatcgcaatctgctcatcgacaatcatcaacttgatatgacagctgcgcttcttgaagctattatgaatcggacgagtctggtccttgccgacatagtagcatatccgtagacgagacttctcttcgtcggtttcgagggagttgtacagcctgtttgaaatcatctcgttggtcccattttgaaatggaagtagctcgcctgcgtcgttatagccaaggcatagatagcaggataccacgacaccccggcgaacggcgtccaggatgggttccagtagaggttcggcattcatatttggtgtctgaatgaggattgagcgctgggcgttgttgatcgcggacagccacgccgcgttttgcggagtgtggacgctgctgtgatttggagcttgaagaaattgaaagttagagtcatacccggctgtctgagggagcttatctttgtgggtttgacttacatccatatggttccctgtttaccaatgccattgcgaagggctcgtgtcgtggtatgaccatataagggttgaacatatcatcctggtcaacttctggtgcatcgcctgttgtgtcaagctggatagttgtatctgttgagttgttagatattatcatagatagtgcacaggtaccacatactgagatgacggctaacagcctgggtgcgcgtttcgtcaccttgtgggtagacagaatcattgactctccgggcctcttgttcaaagtcattatcataatgtggagagtcggtagtatgctcaggaagaactgtatcgccacgctctgtagaaataccgtcgtaccttcctacatggcatggtatcggagcatctttggctggggagttcagaagtggaaagggggggtcgagagcctttccccacgacagcaaagcagcatcatagaaagaatcaacaatcgggccctcgatatgagatagcatctcaaggttgtcgttgtcttgtatgttactgctctgtatgagagccatgcgccggtcaatcacggtaaactttgcatggaacgttccaacgacaggccggtggtagttgatgacttggagatcgacattggggatctcgctcgcggcaggtagcttcacttttccaccgacatattgatcctcgtggacactcagtctattctcccatgcctagtggtttattagaatcatatctaggtcgtgtgcgatatatatatcaaaagtaagagcactcacctgacgaggatctccgcgatcatacatcaacttcataatcactttctgtccccgttctcctgctcgtttggagagttcccggatggcattcgtcaccaatgtcgatgcatccgagtggatccagaaattggtacccagaaagacttcatgttcagcgcgcgcaatgcaattcgctaaatggcgacagagatcgggtagcggggcgacaatggtcagtggtagaactcctgtgctccccagcagccggggcgatacgacccctgacattgggttattttctaaacagcataaggcgtcatgataaacctggaaatatgtcagattgattcttcacataatgatagaggaaatttgttcacctttaaaaatagatcactcgtttccacagacccaaagttcccgcaagtgcgagctttctgcagctcatccaacgcttcccattctaactcattttcgacgtctgattgttccgcgcgatcgagtatatccgacgcgtcacggctctcgtacagattgtaaaagacatcttgcggcgattgcgacgagtcaagagccaactcccacgttactgtcggctcttgacacatattgtacaccttgcgtggtaccatcttgcaccgaactcgattggggctcggaggttgtcgaatgaataaaataatgccgacggtagaaaaggatacggtcgcagcagctagcttgagaaattcgacgcagttcaagagtgttccagtcaagttccacgggtggaaaataccatccatgactgggctgacgtagggttagccctgttctttccttcggggtttcttctttgtagagacacgcgtcggggacttcgatgcgaatggagtcgaacaacggtgatgcctagaatattttctcttagctccatgtccttctttccaaacttggaaggaccgttcagccctatgacgtctgtgctgtataccccacaaaagtaccgaggggatcttgacagccccggtatttctacgatatttctatatgctggaatattattgaccaagccagtagaatttgtatttattcttgaggagattaaagaatatacataaagctatttccaaaaggcgtgggagaaaaatcataccggtggctctccgatatatatgaaacatgaaacccctaagcttttctagtgcatctccttagttcgagatatctccgctctaaactctccctgttgcaagcccgcggcttcaggcacttcaatcccaaggtcaatatctcgcactccccaaacagagcgacggggtgtcttgatcccagtctgcaaatatagatctagttcatcgacataatcatatgcagccttgccagtaatggcgagcctctcataagagtcaagtccgcctaagcgccactcgggtaagggcttgcggcaatctcccaggtcatacacataaccagggcggcccttctcgtcaatcaccttccgacgggaaaacttgacgtcatgcccaatcggcgtgtagtccttgatctgctccgtcctaaatcccactactggatgaacaaactcaaatgtctctcctagtaggtttccctctttgtcaaaagaatcatagtttccaggccggcgcctctcagacccgttggcgtagtaaaatagcgtaaagctgtcttctagcgggcctgttccccagccatagctgcgtcgcttgttcacagaccggacgggagacgtggagggatgcttgagtttgaaagctgaagctattgctgcaaccttgcgttgggtccagccttccaaagactcgggggctggattttcgacaagcgttgaaatgtggcgttccctctcttctctttcctcggagatagtctcctcattgagcgacaggtggggtttgatccggtccagcatccaggagaaggtaatattagacatttcttccatgtcgccctcgtctttgagggtttcactcgaacccccgccgatgttgatgtgataaccggggaaccacacctgtgtcaatgttcgggggtggagctggtgcttgtggtcatcttccaactttaggagcacgcgggtctcctgattcaaggctgtggccatctcatttagctttcgggctgcgttgttgacatcctcgtcactagccctgccgctgctcttgatccggattgcgtcttgcaagagatcgttccattttttagctttctgatcgactattctcttctgagtttgtatctgatctgaagtgacgtttccaagtttatggagataccacagagtgggcgagaaggcattgcggtgttcatcgagcgccaaggcctgaaatgcatgtttgatatctggaaccgtctgtcactattgtgccccacaaaccaccttgaggcaagaaggaaagacagatcttaatatacttactaggtgaaagtccaacattttcccatccattcttatccgaccaccacaacagccacgatggcaatgtcatccccagtacctccggaattccaatagcgccgaccgtatcatagacgccaacaatttccacgtcccttgatccctcctgagcccagtcaccctcgggacgcttctcaaacacgaaagtctcaccccgagcgccctgattctcatcagcctttccatcaatccactcaaaccagaggtcactgcaatagaagcgctcgccgggtgtatttttcttatagacctcccagagatcgggaaaccgattcaaatccctcttacagcaaataccaatatccgagattaagcccgcaatagcccgggccgtgaacgcgcccctcgagaaaccaaaacacataatctgatctccgggtctgtagttcaggacacagaagttatacgcttcgacgacattcccttctaagccctggccaatggcgccttcgatcctttgtcccaaaggacctgaggtcgtgccgattccggagtcataccagactatttgctgccattgattcccgtgttcgtcggttccgacactgttcagggcgcggcagagacgcgtcacattagatgggacgtttttcttgcctgagacggcggactgccatgttccgtcgcagcagatgatgatgcgcttgcgcatggggtgagtctttgaatccctcctttgttgggctgtgcatgctggctcatgaatctcggaggatggaggcattgtgtatgtaaaacggagtctaatctggtataaagaggattaagcttagaaggtggcaatgacaccgtctatatagttttcgttttcacccttgtctatgttttgattggttttttcgcatggctaggtttcatctcgaggtcgctttgattatctgttttctctacctgcatgaagccccccgctactatacgaactccagcgccaccgtcagcagggttcgagtcacccgtacgggggactacagtaaaacctagttattgcggagcgaagcgaagcaagtataaaccagaagatcttactctgtacagtgactgttcataagttttaacaccccctaaagccccatatatataccgccttcctatacagtttacaccgccatattatggaggattgcggcagaacacaaggtaggggtacgtgtcacgtggcaaggttttttttcccaggggagctgaatatgacacaagcagggagttgatctagccgaggggtcgctgtgaagccaataagccagcaagagggctttgcgcagcattagaagttagaatcagaagagcgtggtcctcgtcatttcggatcgatgagccatcggaggacaggtggggaggtaggagggactcttcccgggcaagatcactcgtacaatcccgtcacgttattcgttgtatacagtcctaggtcgaaataatttcttgtcggagacctgggggtatgagagtgttatgaaatgcacggacctgcgctttggatgaggtgttgattgaatataattccgcagtctccactgccaactttgattccgcatggtatagtttacatatacaacatatttacaactagaaaaagcttgtcaatcagtcatcagtggtgcagtctcctgaaattagaaattcagagatctccagcgatgtagccatcgcaggcaaagattgcgagggcctggggcagactagcgcccgaaatcttcagttgtacatatatcgctatcacttgtgtgactgatgagatcttcattgcattcttagtgccccactagggtactggacacgttcgaaatgcatcaagctttcccaaaactccatgtaagcacttgctcggtatcggcatcaaaaaagccgatctaccttatcgtggcaagatcgccgctaattatattaccataagattgtccgtacttagctcggaagcatctatagagtcttgtgagaccacttcaggccattcccatagtctagtggaaatcgattcacaaagaggggaagaagcatagagcattgataagagaacagtgaagcaaatccaactgtgacgtgacaaaaccggcagaaatctttctcaatattagctgtggtctatacggagtactccgtacgaagacagaaaaataattttcaatatagaaagtagggggcctgacaggtaggcatcagaagcaccatcctgaggctatgctcgcgtaaagaatccttcacagtgatgtacatcgtatagaaacttgcgataatccctgtcgcaaagttgtgattgggcagatggccttttccagtgatgggggccgtgacgggaatattggcgcggaaaaaaacactggagtaccataagcacttgcgacgatccatgtaagaaggaaatatgctaatgcacataatccgtttccatggaggagcaagaaggggcggtacttgattgagaatccgaggatgtttaattggggcgtgtcgcaaatgtcatataaactagaggctcatcgtttgttctgctattgaattgacacccaagtatgaaagccagtaaactcaccagaccggatggcaaagtagcccggctgcgagcatcctgtgatgcttgcaacgaatccaaagtccgatgcagtcaagccaagccaacttgcgcccgctgcgagaagcagaacatcacttgcgcatatggattatcccgccgcagtcacaaagatgccccacgaattggaactcaacctacgacagtaccagaatcctccgaatcgaccggcgatgcgtcctcgcaatcagccgtgtgtcccccttctccttgccgggcaatagacaacgcaacacaatctacctccgagacgtctgatggaatatgcaacaaggacacctttgatatgatggctgacagcctgtcttccttccgaccaaatatgggactgtataatccacaagtattcgacgcgatcgacaacacattggatctacatacgggattccaccaagtggaagacatgctggatggctacgacttcctcgaccaatgcctcagcctacctgcacccgggcatacagcaaatgaggatccaaacaccgaactagaagctacaagttcccaaaggaacaatcatcaccactcaaccactgagagtcctagccatcataagtgtagctgcacatcccatctgatgaaacaattggtatctttaccgcttgcttttgagaatcaggcaaccttatcatttgatgtgcagctctcagaactgaaactagcagtcaacgtggcaaaagcctgtatgggttgcagttgcaccttgcatgatgatatggcgatgtgtaagatcccaacacgttccacccaagtcacatcgtcacgacgttgttcatagcagagaacaatagaccggaactcttacaaagcaccatactgacaaatcggtctatacctttctagtgatgatcagcattcttatcgggcgagtcattcaaggatttgagaaaaccctgtcaataatccagcccatggcaaatacagaaactttgaacgcgtcgagcggccccccgcaccgcggcggcnnnnnnnnnnnnnnnnnnnnnnnnnnnnnnnnnnnnnnnnnnnnnnnnnnnnnnnnnnnnnnnnnnnnnnnnnnnnnnnnnnnnnnnnnnnnnnnnnnnnnnnnnnnnnnnnnnnnnnnnnnnnnnnnnnnnnnnnnnnnnnnnnnnnnnnnnnnnnnnnnnnnnnnnnnnnnnnnnnnnnnnnnnnnnnnnnnnnnnnnnnnnnnnnnnnnnnnnnnnnngggcaggcccgggcacgcacctacactgtcgtgggggacgctccagatcgaggcagacgaagaagacgagctgaagcagcatatgtggctgctacagttcaagaaatttcgaccggttttaaaccagttcaatacatatatcggccgactgggaggtacttatggctttggtgattctgctcaggttaaagcctaccagtgcatacatatgtggttggcgcaaaagatggataacgtgaatcatcagtataaggcccaagaaaagtgtgaggggcaacttgataggttagatactgtcaatcaggtagcgcgatagagccggagaaagtgagatgaagggaagaagcctggtagtcagatggacacaagagactggacctatgttcatattagaggattcacataaaatgactatagacgcgtacatgaagatggcgattttcttgcgggcaggtttagtataaagcaggggcttctatggtgcattgatggctcatggatagatcctcggtatagaatcaatttgtgttgttatgatgtatggcatgcgtgagaatctaactgactactctttcaaatccgaaagtaaccctagcccctatgcccctgcgtatgctctcattattttcccacttccaagctggtcatcgccaggtccctaagtgactcgagcgtgcaggacgagccgagcaacatgaccaacggcacatcggttgtcaagctctggtagaaccatgttcggaattcagccccaatcatactgtccatgccgtattgcagcaaaggcttcttgacatccacaacctcgtacttcaaaaggacgaggttgccaaatcgccggcggatgtgatccagcacagcctcgtcgagggtgtgacctgattgcatcagggtcgtaacctcagcaggtaggcttccgttctgcgcttgcgatgactcatccgagccaccgtccaaggcgctggctaaaagattggcgcgtggatcgtccaaagctggatgggacccttcgaagcctctcttgcgcaattcctttagtccgaaggcttctagacccgtcagaagatgggaagcggctaattcatcgtgtgcgtgcgatattcccattgtagcgctggatgacaaggcaagatcaatgagctggaggagctcgtcggcatcaatggcctgaatccctttgcgtaaaaggagggcctcaatttcgggattatcatgtagatagccgacttctgagatcatacccaagccaaccgcaacggccggatatccttggttgcgcaggaagcgagagaactggtcaaggaaatggtttgcggcacagtagttagactcggtcgcagtaccgacgctgccagagacggaggaagtcatcaggaagaaatcaagatgagagccccgtccgtgcatctgcaggctgttgtacaaattccaagatccttgtactttggggtcgatgccagtatgccagtattcgttgggcatgacagagaaaattgcttcattcagacccatggccgcctgcacaactccgccaatctcacccatggcggcagccgcagtgataacggcttcgacatcagacgcctcgcaaacgtcacctctgactacctcgcatctggcacctgatgcttcgaggtcttggaccaggtggcgtgcagctgccttgtcaataccggatcgacctaggaaggtaaatttccgggcacctcggttgaccatccaacgcgaaagagtgcgccccagaccgcccaagcagcctaccatcacatagctcttctcactgtcaaattgcgtggtgtgcctcaggggttggattgggatggtggactcagcccgttcaagattaatggccaccttgccgattctgctgcgcgatgagaagtaacggaatgcctgctcagtctcaccgatatcaaaaatattcagcggctcgaacgcggtgatggttccctgccggtagagtttcatggcctgggaaagaaggtcattccatagagagtgaagctgctcactatcggtgtggtagagatggctgagatcgaaggctgtgaaagtggtactttgtaggaattggtccatttctagacggccagcggtggtaaggtccatcttgccaatctccacaaaacgaccaaacgctgcacagcacctccacgtcgcgtgtagctgatcgcctgtcagagagttgagaatgacgtctacgccgcgcccagacgtagcactgaagataccctcgaggaaagaagtatcgcgagagctgaagatgttggatgctttgacgccaagtttatccaccaagaactttttcttctcatctgaagagacagtggtgaacaccttcacaatggttttgttagcatgcattccataaattgaacggtttcaattcgacttacctccgctcctgcatgtagagctaattggattgccgcgatgccaactccgccggctccggaatgaatcaagaccgtctccccagcctggatatgggcccggtagtgcaaggcatagatggcggtggcgtagactataggtaacgtagcgctaatgtcaaagctctccgcatcggtaagcttgtggcatgcccactgaggaagggtttgatatgtttggaaatggcttggtgccatggcaacgacacgatctccgggagcgaaatctgtcacaagagaccctacttgttcgactgtgccagcgcattccaactgacaggtggcgtcgggcgtgtcgactcgtccaaccaagacataatagtctttcgcattgagaccgaccgacgcgacccggatgcgcaaatcggtcgggccaatcgtttgtggagctttcagctgctggaaataaatagtgtccagctgcccagcttgctcgatggcgagtctcacgtctttggcatcgtgtaagctagactcggtcgtctcaagtccctgcttgttgcggaagagggtattaatgctgtcatcgggtgtgaaccgcgagacgtggaccacccccttgcgctgcgcaaattctaggtctggcttcttaccaggctgggtgagaagagataccagacgcttcgcagtcatatggatttgagtttcaggctcgtcaatatcataggtgtagagcttaagcgagggttgttctagcatcaatgctcgggccaggccagatacaagagcaaagtccggcctgtcaccatgcataatattaccattggtaacccacaccaataatgttgcgttgtctgtcatgaccttgacgcgggccatctcatcgtcagagatgacggatagaagaggagactttatctcacagaggttgaaaattgttgtcccgctcgagacatgtgcgggtgtgagctcatttagccggacgcgcatcacccattgtccttggatgggtttcagggtatccgccagtgcagatccgagcgcagttttctcacgctcaacgatgaggaatttgtgcctttgcagtgaaacttgttgcaattcctgcggcttgcgcgcaacgataagtgttgtaccatcctcggaaaggcggacgggaagacaatcgagaccacgcgaggcaaatgaattgcttgtcaatccggggcataaggccaaaatggatgcgtcgtcggccatcaagccgccaaaggtatccacggcccggtcgatatgttcgttcatcgccggaagtaggatgaggtcatactcatggtccagttcagtgggactggagcagcgctctccagtctcaaggtttaagagacctcccaagatagtgccatcatcagaaactgatgctgtgctatatgcggacaggcgcttgaagctcccctgtgcggatagaagtcccaatacagccagggtgatgtcttgcacatcatttccaatttccaaaatacggaggcggggatttttgtgcgccaaaaggtccagcatagcgcccatcttgaggagcgggccggacaccggtgaatgggcctcatcagcaaacttctggacatggtgctgcgcatcatccatggccatgagccccagtccataaatgtcaggcttccaaagtacccgaagaactggatggcgcttatcttctatgtctgcttgactggtggattggtacggggagagtcgaatatcatcgaattgagccacaatttgtccatcgctgtcaatcatttctataccagcatgagtgtatccgaatccaatccgtttgacgactgcatgcatttggcaagtctgattggaggaagtagaagtgtggacgattgccgatggcagcctcgtgggtatctgggcacgtaactccttaggtttgccattggtggctgcaaccacagctagttggatcatgccgtccaaagcgattgggtgcactggatataccgaaatggaatcgccacttgtcttcaatagaggcgctgtagcactagcgaacgactccgatttcatacgcggggtataaaattcggagatggtttggaaggttgggccatagttcaacccctgcctgatgaatttttcgtaccaagtccgcttggctgtggattcaagcgctccgcttggtggcttatattttgactgcagagccgcgttgcgtgggtgaatagcgatcgatccagatgcatgctgtaccgcagatccattgtggtagcttgatatagcaaagtcccaccaggtggctgatgtggctgcattggtaatgacagacttgtgcagagaagtgaagatctccgcgctggtcgagaattctgtgttcaaggtcaacgcgttcgtgatgttgacgttggagaattgaaatgtagggtccgtgcgcgccgcgtcggtggcctgcataacagcctccatcgccatcgccaaataccctgcaccagggaaaacgaccgtatcaccaagcttatggtccttaagccaggagacatcatccaccttgaggatattgcggaagatcttgtcgcgggcatttccaccggtgagtaggctacccaggagttcatgatgcggatacttgcgctgcctgtattcaacactggcgcggcattcgttccagaggatgttctcgtagttgaagcgatacggtggaagatctgtgaccacgcggtacatagagcgcacagacttcaaccctgtctggaggccattgacctttgaccaattgatctcataccctttgagccacaggtttccagcaaagctcaggatgctttccatcgagtccacattacgcttgattggggcagcatatttgagttctgcgccggcttttgccaaggtttgcttgatcggcagttccagtgaagagtgagggccaagctcgataaaacagtgctccgtgagttcatgaatgcgttcaatcgcatgagcaaaccgcacctggctttctaggttgcttctccagtaacttgctgtgaatccagatgacttgagctcaccagtcaccgaagacatcacagaggcaccctggggctgtcgaatcgagggacccaaactagggagggcccgttccaacagggcctggtactcttctccaatggataccatgtggtgggagtgatacgcctgcccgcctgtcttcagcttgcgcgcgaaaatattcctctgttgcaaagtcgccaagaagatgtccaatgcattctcatcgcctgagacggtgaccccctccggagagttgacgcaagccactcggatctggtcatccagtcctgctttcgcaatttcgtccgtggtggagctttcagacaagccgatagccatcatagcaccgacacgagtagattttgagacgcagtatccacgatagtaggcaattacgattgcctcggctgcagagacatgacctgcggcgaaggcagctgcgatttcacccgaagagtggccgactgtcatcgtaggggcaatttcccaagaagacagaagtcgaatgagggcaacttgtatcgcagtacagcatggttgagatcgctgtggtagatggatgaggcttgggttatcaacatccaagatcgcctccatcagtgaccaactggggggccctgggaggctcttgaggactgagtccatctccgtgatggtatcccggaaaagagaaaattccgagaggagctcacgacacatgccgggccactgagacccctgtccggtgaaaacaaacgcaaatggagtagatgcaacacctgtgactgggctggctgatgttacccaggtgcgtgtctggaaactatgagagctttcctgtgaccgcggagcaagtaaaaaccctctctcggcaaagtgagttcgcctggagcccaatgtatacgcaaggtctgcaatatctgtgtcaccaaattcatatcgtgcaaagtccgctacgcgggcttcgagggaggcggttgaggcagcggatagaggtaggatcactgtggactgggtgatgggcagttgtctgagctgccgagatgaactcaaagtcttggtaggctgctctaggataacatgacagttcgcaccgccgtaaccaaaagagttaataccttgagtgatgaattagctgattggtcttcttgtctgtcgaacacgccgtactaaccaacacgccgcactcgagacgagtggtttggccaattcgtcaactcagttggaattttgatattcctgtcctcaaccttcaactttggattgatgttttttaagccatgagtgggtggaatttggccgcgttcaagggcaagggtagacttgatcacgcttgaaattccgctcgctgcttcagaatgtccgacattacttttcaccgacccgatcatgagggggttatttggcgtgcgttgaaacacccgcgataatgcctcaacctcgatggcatcgccgactttggtcccggtgccatgacactcgacaaacgtaatgtcgtccggaacgattccacccttggccatggccttttggattaccgcctcctgaccatcggcgctgggtaaactgattccagatgtcttgccattcctggatacaatcgcatttcagcacaaagccaggagttggggagaaaaaaaaagcttcacttacgcgttgaccgctgacccacgtatcagactccggattgggtcaccatctcgcagggcatcttcgagcctcttgacatacaaggccccaatgccatccgcacgaccatagccgtcggcagaagtgtcaaatgtgtggcacgctgatgttccggagaggaccccagctttcattgtagcaatatgttgctcggcggactgaatcaggttcgcgccggcaacaatggcggcgtcacattcgcgattctgcagggctgtacatgccatgtgaagacagtagagtgatgaggagcaggctgtgtcaagaagaagactgaatagaagcgaccaaaggtgagaaatcataaattccagtggatatgttgcaatttacgacttacctaggtcctagaagattgaagacatggctgatgcggtttgccaagattgtagtgcctagacccgttccagagtaacggctcagactacactggttagctatgagacctaacaacggacccatgaaaaggacaatatgtacttactagtcagggtcttttagctgcatcaccatgtagtcaacagtgaaatttcccacataacatcctgtatttgacccagatgcttgatccagaggtattcctgcattttccatgcattcgtatacaacttcaagcatctttcgttgttgagggtccatatacttcgcttcgaggttgttgatcccaaagaaactgttctcaaactctcgcacgtcatcatcaagaaaataaccgccttctgtgatcatacttccggggcgatccatgccctgggggtgatagaagccgtcgacattgaaacgcgatttggggaccttgcattgggccgatctaccattggaaatcagatcccaaaattcacgagggcttgaaacttcccctggtaggcgacaggctgatgggagataaatattattacaattcacaaagacaatcaagaagcatgccttaccaattccgcagatggcaatggcctcaccaaggccttcatccgcaggtgatgaatctagtaaaataggcgacatgatgaggttcacgcggggcaaataaatttgagcagccaatattgtttcgaaaaagaagtaatagttcctatttggaacttattgagcgtctcttgatcatatacatatgtatatgtttaccttgaggctaagacccgccatatctggtctcattgtgctcattgaaagcgatcgccgacaaaacacctgcatttacagatatcggaattctctggaattgcatgatgaccccggtaaacttggggttaccgtgtattttgccgagaaatatgaagttttcggccatctgggaatcgaagaacgggcttcgcggctcgggcacatgcagtcaccgacgagtctctacgccggacattcaatctccggagtagcccaatcgcattttcttggggaaattttgctctggctatagattctagataacaaggggccagttactctgcttgttgagagatttctattcccgtgatcttgacagtgcatcagaactagcgacctttccagccactagaataggattttattcttcagatatgattaccaaggcacatactcgtccttcggtcctgataactgggtaaaagcagactggatcctgtttacaggttgaaatgctcatgatggaggtagttgcggcgaggggggaatcggacatgctttggcacttgacttcaagaatcaaggtatgttacatagaaaatttgtattaacaagttctgatcgttcaatgtttaggatacgtggtcttcaccactcttctcgcccatgagccacgggaccatttgaccgatctcggaatacactcgttcactgcggatgttacgaaggacagtgacattgagcagttgaaggaggccatttcaagcttgacagaaggcagtctgagtgtgcttgttaataatgcgtaagtaatatatgtctatttttcgttggctgatctaacgatggcttcaaacttggatagagggatatgtgagtgacgaagagccaaaagaggtgataaatgggctaaaccaagcaggctatacgatgaccgcaatcgatacagatgtgaaagaggtagagaagatgtttggtgtcaatgttttcggaccgatgcgaatggtccacatcttccaccctctacttatcaaagccagggggaagattgtcaacattggcagcgtgggcggtattgttccttatgtttatggatgcaagttgacttttgatcgcctgaactgtgctcgagataggagctgaccgactttgaagctagctacaatgcaacaaaggccgctctccaccactggggcaacaccttaagagtcgagatgaagccgctcgggtaagcctctctactagaagatagtcacccgcgctgacttcaataaatgaagtgttgaagtggtcaatgttatctccggagaagtgggcacgaacattttgaaacgggatcacaatcgcaaactaccagaggactcgttttaccgcccgctcgagaaagagttcatgaatcatgtcacaagaacacctcgtgagcatttatctatttagctttgtgagcgaattgcatagtactaacgcttgatacaggcacgactacaccggcggagtattcccggtccgtcgtcattgaagtgatgaagcaacactcgactgcttggttctggacaggagccagctcggggattgtaagatttggcgagcagttctttcctcgtacgctttgggtaaactctctataattccgtttggctgaacaccagcggtacaatggctaacatcctgtctctaggactggatattcactcgacaattcaacttgaacaagcttcgaatgtgagaattgagccaagtgactacatcatagaaagcgcacacttaaactagcttcatagaaatctttcgagatctacgaaattcacccagaaaagattcatcccatcacactggtaatagtctagttgtataaatttgattgctgaatgaaccgttccacattcggaagtttgattcaaaaagaacagcgacaaggctagactttcacttaactcatgccttggtatttcctcatttggcaatcatctcacgttcatgtcgtcactagcatctcaatcagtgcagatccatgtgatacccaaactttgaagttattataagtgtcacgaggatacaaaacctgtgatacgagggatgcatgtaactaggaaactaaagataggaaggaagaagaaagaaatagaatgatacggcgagcccacttataatatagatcgaccaatcatatcaacaaaaaccatcgtcaatgcaaacaaaataaacaccacgagcttgttgctcgtgacataccggttttatgatatatccagtcttgcagaccattgctttcatccagctaggtaatttgcatatgtaacgctttattagaggtatttaagggaacttatgaaagtggcaaagaatatgtatttgagaaatgaaaaggtcattagaaaggttattgaacgatatattgttcttctgtgtactgaaaaggtaagccgatataggactataaaatgatttcccttcgctctagcaagtatggattttacatgactgctgcagaaagatggcttcacttgcggtgatcactgcttcacatccgcgtagtccttttccaaaatccccaagtgctcagtaatctcttccccattcaccttcgtcggagtcacatcgagcaggacaaataacatgcgtcccggtcggttttcgtctaagttcttccacatatgcatacagcctcggttcacacctaattgggtcagccacaaaatactattggaatttatcgaaagcgtaagcaaagacttactcatatcaccaggcaacatcaacttcttctcgccactgtcaagtgtgagctcaaaagctccctccaccacgatgccgtaatcaattgataaggcacggtgaatgggcgattccacgcctgggccaaagtcaatcaaacgaacaacacttccgtttgagacatgaatggggggctaagagggacaaagccaagtgttagcagacgcgatccataatcagacaaataggttgatttgcccagcaaaccttcgtacctcattgtcgcgtgcataaaccaggtcattatcatcattcatgtccactggattcccagaggtgctgtaaatgatgtttgcgaccgccagcccatccaccatgatccggtggtggtctccatcatcgtcaacagcaaatacgcctttgccttccttgttgtgggttgtaatgaacctgcgcgcatggcgaaggccttcggccggaaacttggtaataggtcccttaggagcggacatggcaattttcccaaagtaaagtagtaagatatcttgtctttcgttatgaaaggttagagataattgccacgaaaaagaaatatcttctctatgtataacaaacctgagagcgtctctgctcatgggaattgtcggaacaccgacgtatatcgaataccatacgccctcctgtcttcaaatcaccggtaattatcaatataggaagtctattactagcgcagatatcggaaaactcgggcaagttatcaaaccccgtgacgaattggccctttccgagtcatcattagcaggagcttcgggaatacctaggtgcgagatcgggaattcagaaggtgtggcattttgaaaaaatataccgaatgccaacctacagaatcaagcaatctagtaattccaggatatacatgattaggaggggttcatcatcatcatatactaaaaaaaggacttcaagttaaaaatctggatcaagtacattacattatggtacaggactgaggagtagaccaattccaggtcgcttctgctctaaaatttccatcagttcttcccatagcttctccatcgccaatatgccttcttgacttcttacgaatggagacaatgctgatctgatgataaaaggcatgggtcagccacggcttgaaaattgtatgaagagagatattctcggaagggttcatactcatcaatatggccgtcatttaggtactttccatgacttttgtccccttgcgcaatagctgcgaccaatgtgcgacctccaacttctgtcgtccgagcggtggccttgctcagaagccagagcgcgaaccctgtgatcccgtgcacattctcgatgagaccagaagtgcagtagccaggtgtgaatgaattgacaattatattgctggtgccgttaggagggtttgaatcaagttgttttgccatcgccctcgcaagtagtatctccaacaatttggagatgggatacctgagaatgttacatcagttcttttcggccttgtttgcaatgtgtaaaagacaatagattgaactcacctttcatgcatcctggcttgctgtcgatcattcaaaacttggaaggtgttttgtgttttccactctgggagatcatacattacgtgcctgtcggatgccacgaaactgatgcagggctgaatcacccatgttttggatgagcgtctgagtgctggaagaagcagtatagccagcaaaaacgtattaatcacgttcacggtcaacgtgctttcatgattgtcggcccaaacaaagtcatgggtgtagatacctgcatttagcagaacggcgtctattcgacacatttccattcgggtagcaaattcctgcaccgactcttgattggccatatccagttcctcgacttggatgactccagatcgccccgtcaactgttcgagtgtatccgcggctatctggcctttctcagctgaccgtgcagctaatatgagtcgactcacattcaatctcaacaaatgacgggcagcctcaaaaccgatgcccctgttagatccagtgatgataacagtttggccttggaagtcatgcgtgggaactggcggctcgacgaagagctgagagtagaggaacgaaagcgccgacatacttgcggtggagatttctggcagcgtagaaggtgatttacccaagtcatcggggaaattagtcgacagggttgtaatcccagtggcataaacatagagatccccgcttccccgagtgatcctaacaggtcggtcattacgcatttgccgagacgcaagagagaagggaaaacttggatctattcccgttctggtctgtcaatgtgcccatatccttctgtaatttgtgatttgaagccgcgtttggaggggcccaccacatggtgcagtagaatctacacagctataatgagtgatatcactgctgctttcgcatgttttagccatcaagtgtaaacatggcagcaattttattcttgggacctttagttctcatcctagccgtatggctatcgagctgggtcttttcgccaaaacagcgcttgcctcccggtaggagaaaatttgggctcaacctatactttgaactcttcattaagatcatcttgcaggacctcagacactccctttcattggaaatattcaccaatttcccagggcgggtatccacttgcggtacttaggactgctcaaccctcactttcttgcattgtcgctaatgagaactcccacagattcaccgactgggcgaagcaatatggtcccgtctttccactcaggattggttcgcatggtctcatggtggttttgacttctgcgtaccatgcaacacatctcctagataagcgctcagccaactcgagcaatcggccgccatcctttgtgctgggcgacctggtctttgctggtgaccatcctatgtttatggatgcgaacgagcggtggaaactcagacgaaagctttactttcagctaatgaatgaggcgcggtgtaacacggagcatatacgtctcgtcgaggcagaagccacacatttgctacgcgacttgtgcctcgagccggattcgtttatgcagcatcctgctagatacagcaacagcattatcatgagtttgggtaagtgtaattctcatggaacaagatcagctgctaatttcggatgatgttagtgtttggcattcgcacacctcactactctagcccccactgcattgagctgcaacgcatagtaacagaattgagcaatttgggcgagattggtgccagcccaccggtagattggctgccgtttctcaaatatctcccggagcgactctggggtgattggaagacacgagccgctcgacttcgtcaacgagtcctgaacctccattcccctcttgtggatcgggtactggaacgccgcaagaatattggtactgctgcgactttccttgatggagttcttgatcggcaggagaagctgcaactcaccagagaagaaatagatatcatgtgtggcaacttactcgaaggtgggacagacaccatggctacgacaatactcaccttctttcaagccatggtcacgtaccctgaagttcaggccagagctcaaaagcagatcgatagtgttctcaccgatggagagtgtccatcctggagtgactatgatcggctaccctatgtggcgatgattgtcaaggaagtcttgcgttggcgacctccagctccaggatcattcccccatactctagctcaaggtatgctgaaacttaccctatgatcgagaatgaaacagagcaatacgctcatatgttgatatagatgacgaatttgaagggatgaaattcctcaaggggacatccgtggtgctcaacgtctggggtattcacaatgatgagtcccgctacccaagccccgagactttcgaaccgtctcgatttgccgagcaaacccgactcgcttcagtttatgccaatgctggtgatgcacaaaagcgtgatcattttggctatggagcaggtcgacggatctgtcctggcattcatttggctgaacgcgcgcttttcatagctatggctaagcttctatggggatttactgttcaacagaagttggatagttccggcaatcctattcctgttgatgtcaacccggccacagcataccgcgatgggttcttaaatcagtgtctgcctttcgatattgacatcaagccccgactggggagacaagagatgatcatggtcgccgcggcaaaggcagaaaatgatgttctcagcgcctatgaatagtcttaaactagttaaaccacgaatttgaaggagacgacagttcacccaccctacatgccattttttttacccaaccggtggcctacccaaatcacgtgactggtagcctatcttatcttcactggttgggtcaacttctgtaatttggtttttaaacctcaccaataccttaacaataccagctttccaccaatcatttctcgtcaatacctccacttgaggcgaatcagggagggataacaccttaataagaccgtaatagtatgttattctatacattcatagaacatatagtatgtctgttgtataataacacctcaataagaccttgatgtaattagtcaactaggcccccagtaactgactagtaatgatttaattaatgtgcgcaatctcaagaccattaaataatcactgataagctcacccaaacggtggatatctcacgtgatttgggtgggccaccggttgggtgaactgccccggtcgcgatgcaccttcgttgtatagcttctataaaactctgagactaacgatataccgttgagaacagcattttatcaacctaaagatgtggaattgctagtaatgtacccggctcagagagatacatgatcatttcaacaagtttgcacttgcagcgttgttccaccgtctacaacccaaccgacaccagttacatagctcgatctggggctagtcataaataagaccacgtctgcaatctcttccggctcggcaatacgtgacatgggaataattgttcgcatcatctcagggagatccgggtttccattaatggctgcagtcaccataggtgtattgacccagcctgggcaaatcgcattgacacgtatctcatgcggtgctagatcgagggctgcaaagcaagaaaatataagcctggattttggagtttattcgaattccgacataccggcactcttggtcaaccccataacagcatgcttcgtcgtcgtatatgggacaatatctggcgtcgcgatatacgaattgcatgatcccacgttcaaaatgacgcctcggccaacttggcgtgatttcccctgtttgttcaaggtgctgacactctgtgatttcataaccttggtcacggacttgatacagttgagtgttcccaacacgttgacctgccagaaggcgttcatctcagaaacctccgccttatcgacgggcttgtgatgtttgaccccgatcccagcgctattcacactataatcaatgcggtcaaatgcctgaactgctgccgtgaccatacggtcgacacttttctcgtcggtcacatcaacagccacgggaagtgcccggtaggtggggctagtagctattgattcactctctcgtgccgtctggagtgcagcctcgaggttcaaatcggctataaccacaccccgggcgccttcggcggcataggcgagggcgactgctttaccgataccactgcctagaaacgtcagaaccggtactacgaaagcctccgaacagcatcctaccagcaccagtcaccactgcaaccccattgagttgtagggccatgtttatttcgctgcgatcaaactttgaaaacggctcgagtgaacgaataccttgacgcctggaacatggatgaatctcttgttttattattgttcttcatcgacaaagtaataaagtgtacaaggaacactgattgtcaaccttggcgatcgctctgcgtggatcgattgaatcgccgacgtccccgacgttcccgacatccccgagatgagattgggattagatcacagaagtttcccgatcacggatgcccctgcattaagtccggtggaattaaacatcagtttcgctttcttatgtccgatcggtagttgttgcaggcggaacgagcgtgaccagcaatggggccaagaactacgcattgaatgaaacgggctctttggcagacttcgcaacattttgcataatccaagatttatttatactacgtatcaagcagtcttgtagaacggtcgaaaattatatctagttttcatcgcagacgtagtctatgagcaattttgttgggcggttttcagctgaacgtgtaatgatctccagatattcgtagatggggaaatcactatggatcccagtttcatataggtcccattctcactctccgatatgaatttaacagaaccttgatgtgtgccttgccactcacctttcagctttcggggcgcccctttttaacgcagtaagatcgtctttctgactgcatagttcatagcctaagaataccaagagatctaagtgcatattgcgtaaaagccaagttagccagcagagcattttaggaacaggcaaccatttggtcgatctctgaatcacaagtttcctcttcctttgcttcctcttggtatggaatgtacttcagcgccattcacttactctacaccagggggcagtgcgctagcgcggcttacatctcctgttgtacgtacctctaaggctgaatcacactacattttgttggatttgggggccaatctaccagtctgagcctcgttctgtcgatgtggaaatgaatttcccatgttcccgatctccgtcggtaacttacagggcaaaaaataacatctggatttttatataaaggttgataattgttcacttgaacaagtccaggttcttccatatcacccatctcactgtatactcaacaggatggtgcaaatatcgaatgtttggggctttggtctcgccattatggcgtctctggcagctgctgcaccaaaagactgtccagacggactctgcctgagaacacgggccaatctcagtccactagaagtcagtcaagaacttggtccgctgatttccaacgcctcaagtatcttcggacctagcgattcacgttgggcaaatgccacggcgagatatcaacagtatgccgcgcccaaatttacagtggtggtgcgggttgctcgcgaatctgacgtttcagtcattgtacgtctccttttccggaccctcaaatccaaatctaacgcccgagaagatcaaatatgccaatcgcaacagtcttccattctacgcagttaatcggggccatggtcttcctatttcccaggccaaattcagtggcttggagatcgatatgcaacttcttactggaattaccatacagtctaacggaaagtccgctcttttccaaggaggaacgtacgatcaacaagtcatgaacacgctatgggaggaaggctacgttacaagtaagtaaaactcgaacaaaaaacacccctactcaaatcaaccaagggaatacctaacattgaatctggaactcagctactggtagttgcggttgcgtgggaatgcttggcccagctctaggtggcggacatggacgtcagcaaggcttccatggcttgattagcgacaacattctcaagctcaatgttgtgttggctgatggaacaactgcgactgtttctaacacctctcatacggatctcttctgggcaatgaagggtgcgggccataattttggagtggtgacaagctttgaaatgagcatctacccaaccgaagttcattcatggtattacaagaattatgtcttcacgcaggacaaattagaggacctcttcgaacagctaaatgtattgcagggcaatggaacccagccagtgaagatggccgctcaatatggcatttacatgatggactctactgtcagtgccaccgaggttagtattttccgatagatatccgagtgaagttttgctgataatttaatcacaaaacaaacaggcaatcatctggtggacttttggctacgccggctcgcaaagcgaggcacaacagtacctgacgccgtttgatgacctcaatccactcagttctactgacggaaatgttccattccctgaagttcccaacgtccaggggactgggatcaacaatgccacttgtgataagggtcttgaacggatagtcggtcccgctgggcttcaggtgtataacgccacagcgcaacgccagatctacgatcttttcaacaaaaacatcaagtcctacccagaactcgccgcttcagctgttgtgatggagggctactctgtagaggcggttcgaaaagtggactcggattcatccgcctatcctatgcgagatgattacttgctcatgtaagtctcagcctttgtccgggtggtttgacaattgcaagcgaaaggaaatatactaatagttctttgtttccataggcaaactaccgtctcctattccccaaattcgacactcgataatgttgccatagattgggttaccgagaaccaaaagttttggaacgagggccagccaacacgaaagcccactgcgtacgtcaattacgcatctggcagagaatcattagaagccatgtatggatatgaaccttggcgtttggagaggcttcggaaactcaaggccaagtatgatcctgagggccgattttcctactacaacccaatcgtctgataaaccaactgttcgtggatgacacgcgcacagtgcaaatttgtctccatccagcctttgatctgttatattgatacaaatcaggggggggctgagatttttccctttctctcgttctcaatacaatgttctatcttgttttaatcatttcagataagctcttcctcatagccctgccgtggtcgcgaaattagaaggcaataaatattgttctactatttagttcaacagttctagacataaatgaaacaaagagattggctttgaggtatcgtaaaaatgctggcaagactgacaagaccaactggcaaactttcatcaaccagtcgctctaccgatgcagtcatcaaggctatagccattgaaactatgatgcgagccaggactctacgcagatcaaccagaaactaaagctagagagagaagaagaagaagggaagagagatagagacgcccaagccccacctctagaaacaatcagccaatcagatccttagcaaacaatatgatgctacagttcgtaatgatgcaaacaaggcaaacaactagcaaacatcacatattgtgacgacctccctggtttacatttcttctgcactctccacgtatatcgttacatctttccatgatctactgcgtcgagtatatctcctggaaaaaaaaatttttatcgaagctaacctatataattagtaagatacttaattgtgccacagtatgatgaggaagacccttcagcactcaggggtagttgagaaatgataggaaatcaattatgaccatattaacatagaactaatgattcttcgtctgctctgcctatcaatgactatcgctccgtcttcgggtggaccgggtggtgtgtactttatgcttcagaaagcgggcgggatcaaatgcctccgggccaatataggacgtaacgtccaagtggctcttcttgaacagacaactaacgtatgtctgcataccctttccatcttctagtttgcgatgctcggtgagatctgcaagcatgtccaggtatctctggctatattcaccccttccgcgagatgtcatccagtcagcgatgccttttgcaagagcaccatcgtccggtccatagcgacgaacaggagtataaaatttgatatccggcactgttgctccaggagcaatatcgaaatagtataaatacccagaaagcaaaagatcaatctcaacgaagttatctttagcggctgggttgtactctgatatgcaagggacctcagaatcctcagggaagtccgagtctaggcctgtaacagctgcaatgagactgcggagctcctggagctgcgattcagggacggggatgcgccctcccattgtcatgacctgccgcacagaggcaaagctggtatggggagattggaagtagaacttgagcctcgatttttcagggacgacattatcaacagccagcatgctaagaattctcgttagcaatattccaaacgaggaagcatctattattgagatgcaaagataaaggcttacaaggggctcagcaattttccttccgggtcattgttgaggaattcgtgcattgcggctcgagattcactgttcggatcaagctgcttgagtgattcttcccacagagcgatgggcaacttcccatccgattgacccagacgacggggaacaaaatacgttttgagattcagaccattcttgagccactccgcggcgactaccaccgtagtggtgaagtgcgcacctgccgccgcttccttggcatatttggagcggtcatgatcgtagagggtggcgaagaaatggttggtccaggtaaggtccacagttggcacgaaatctgctatgcgatgcagcatctcaagtgtggcttgctggttcagaggatccaaaagggttcctgtgaaggagccaattgcctctgtggtgtagcggacatcgggcttgcctgccgcagtattccatttccaagaatattcaatcggagacccttcaactcccagcaaagatttccatttgaggttgccgtctggtccaggtgcggggcccatgtagggaacctatgctagccactccgttagtgttgctgcgtttctagtgaaacatggagaggaagagtgggggaaaaggaacagggatgcgcacgatccaatgatagtggaagagaagtgccacatattgctggtctgttgagtatccagcagcctcgaccatgttagacagatgctggcctgtcagtctccaccaataatctgcatcaggccctcgtgagggcagccatggtgatagagttgcccatgccttggtgggtggtcttgtcacttcagccatgattcgattcaaacaaatgccaattcaatgattgatgagattagcaaagtagtaattatggagtttaatgagaagggatgtattccaaatatatccatcgtggagatatgttgttatcctttcgggcttcatggacctcgccctggctgcaacgaggtagattggtacatcgaaaaccacagcagcgaaccacctaggcaatgtttcgggaaatcgggaatctagccctcaactcgtcgggtatatataaccggggttaccacccgtagccgtggacgacttcgggcactaacttgccagcttgcagggatcatgacttggaaattgtaaatccgattaagtccgaagtgggatacatcctaaactccgttaagaccatttctttccttatgatatagtataattgcttcgtttcgctccgcaattaattgaccatccattgtcttcccaccaacatcgacattacaacatctttcatcccttcaaatacaaactttcctacaatggccgccgtcactaaacccttggttctgatcaccggtgcaaaccagggcctgggattcgcgacagcacaacagcttgctagcactggccaatataatcttcttgttgccgcccgctcccaggaaaaagccgaaggcgcagtcaagcaactggagtctagcaccaatagctctttgacgcctattgttatcgatcttgaccaagacgaatctatcactgcggcagccaagttcgttgaagagcgtttcggatcgctggatatcctcatcaacaacgctggtatcaatagatcgtccgacccaaatgctactctgcgcgagagctaccgagctgtgtttgaaacaaatgttttcggtgtggcggtgatgacagcaactttcctaccactcctacgcgcatcgaagtaccatgaccgacgtattgtcaatgtgacaagcggccttggtcaaattggcatcgcgtactcgccaacttcagaatacagtgctaagatatgggaactgcctatctaccgcagtagcaagtctgcgatcaatatgattagtgctgtcgatgctgtcagtctcgagaaagagaacattctcgttattctagctgccccaggcttctgtcgtaccaactttggaggtggtcagggcgtcaaatcagcagaggagggggctcggcctattgtacgggctgctacagagggttcgccaaaagaactatttggaaagcttgtggacgacgagaacacgctggtcgagttcggctggtagattgaactgttatgaggattgggagtgacgagactagcaatatatttatgagatgttggcaggaatttgttgagataggtgtgtggggctgcctggttactcaggtcatctacaaaccgccgctcgtttacacgcagatctcgagatacttttcggactttgtcttttacagaatgaaaacccctttactctctctgatattgtgtttctgtgtcattcctcgagcaaatgatacctctcgttaaactataccagtacctctcaggtgagaggatggagaattcgccacctccgttgcccttttcgcgagatgagcagtttatgttcggtagtaatgaatcatgaaacggccgtgaatatccaaactgtgtgtaaaattctattgatgtaaccaaaaatttcggaaaatatacaaagtgaaagtgatgaagcagtaacgtgggactcaatgacctgggcgtcagttttccatgggattttcccactcgagattcgaacaaattgctttgagatccttcaaaagttcagagctattcaaatccaagcactccacaaagttattcggaaagcaatcgttagggccaattgccgagtgcccgatgccttcgtgtagtaatcaccgggttcccgaattgagaggagaatctcgtgacaattcaaatcattatactcttaccttgatgctagtcctagatagagtattggtctggcaaaacttgccctgtaaaagttttccaactcttgaacagccagttcgggcccttcttgccaataccttgccctccgcacatattcgccatgttgcactctcctcctccctttgctgatgggcttcgccccctcaaagtcatcattataggaggtgggattgctggtctatctttggcgaatgcctttgaaaaagcccctgtcccgatcgaatacgtaattctggaagctcgagacaccattgcaccacaggtcggagctggtattgctcttgccccaagcgggtgtcgaattctcgaccaattgggtgtgtatgacgatttggaacagctagttcatccggtgcaaagcagcggtgtgtgtgatggacagggaaagtcgttattgcccgagcggagtgacaccgcattgctcgtcactgcccgcatgtcatatccgttgggttgggtcgagcgtcgaagtgtcttgcaagtgctgtttaagcacatctgtcacaagaaaagtgtgttgacgagcaagaggatggatcggatcgaacactcccgtgagcaagagaagcctatcaaggtcatctgcaccgatggctctttctatgaaggcgatctggtcgtgggagccgatggagttcacagtaaaacgcgctcggagatgtggagggtggttgagcaaaatatctgtgatgattttgatgtgcagcaggaacgtcgtggtaagtggccctgaatcgtcgaaattattacccatcaatttgtacggatgtactaacagggataacagccatgatggctgaatatcagtgcatgtttggtatctctagccccattccggggttggacgctggtatgaccgacgacacgcttgcaagagacgtgtccatggtagtggccagtggcaaggacggcaagattttttggtttttgttcaaacgtatgccacaagtataccaaagccatgagattccgcgattcgatagcgcggatacattaaaatttgcagagcaatattttgatttccctgtccagtccgatgcgagcaacattaagttttctgatctgtgggagcggcgcgagacggcaacactagtccctctcgaggaggcagacttcgcgcgttggacagctggtcgcattgtttgcttgggcgacagtgctcacaaaatgacaccccatactgggaccggaggcatgcttgctctcgaacatgcagcagtgttggccaacataatatgccggttggtggcccagggaaacaaattaccgctcacaacatctcaaatcgaaatggccctgagtcaatacgatgaaaaaagacgacaccgtcgcacctccgctaaaataaagtctaccggagcgtctgctcgcatgcagactttacagagtcttgcggatcggcttgttgttcgtttccttttaccttacgctggtgatattcgtgccgatcaattttgcgatgatgccattggcgcagagcatattgaatacatgccagttccagcgcgctctatgacgggtttgatgccttttaatcccaatcgtggtatcggtatgcatgaaagcatatggccacgcgtgttgtgggccttgccactacttgggatggcagttgctgggttgttgactatgttctccgtggcgccatttgaagatgcatacgacttccttgctcgtcgtcgctaccgcgaagtggaactccgagacaaattctaccactctggtttgctcgatgatttctccaggtcgggagtcctgcgcttcatagtcagtgaagcgcacttcttttatcagcctttctccttttttgccgactatggtgtttggtatggtatcatgttggttgagtctgcaaggagagctaaccgactcaacgtcctaagtttgtaagtttgcgacagagtgaccaacactctggatgagaccttctaacatactatttcaccagtgctcttctctggggaatgctcaatatgtggggaatcgccattttcgttcccatttattactttgcttactacatcctcacgccaatttccacctttgacgcatccgacaggcgtctaacaaatctttcctatacaaagactatcctgccagtgcttttggctacccactatgccacttttatggacgcttatctttctccggtgcggtcccaccgtcaggctgctggcttcttgtgggagctattccctgtctggctctctcttgcacaggcgggccttgctcgaaaattcctccaaccgagcacgctgaagcaagatcgactcaataatgttacacgcgatctaccgactatccgaacaaccattctcgggctttgtgccgtttcgactgcagtttggcagtatacagtctggtgcagcgagcactcgcttggaaacatcttcatacccatccgtagtagtgtgcagggccaaacttttgaacagctctttgccgagttcttgaaatgggatcaagtattcttcgctattccgaatttgttttggattatactattgtttgctgatcttcgtgccgctggcttgattcatgctggttggctcaaaatatcattctcggctctgggtctgataattgcgggtgggaatgggacgatgctaggattgatgtggctgtatagggaagaggttctggcaaagagacaagatcgaggcgctgttgtgcgtcccatagcctgacctatggtgaatgcagtgtagagtttgacagcggagtgttaggagaaatgacaagacagaacttagcaggcgttgtcaatgctatccgaagaaataagctgcataagctcattatccttcgcaattagcaacatatccccagtctgtttactaatccagcgataaaagtgaaactagtatgccttatgtcggtattggtgataatgcgcggtgcgccagaatctgcgatgagacctgccacaatagggccgaacccgcatgcgtatgtgttcgggtagccacataaacacaagacctgatgcacagagtcgactgagagaagggccaaggtagacgatgtgaatcgtatattgactcatcatcgatgccaccagtagtctgtcgaagtaatagacagcatgcgatcgcatcggtacagggaagctagagcatacaagatatttgtccgcttcgcattcgactcgagtgacaggaatacgaggggcgtcctgttgtacgatccgagccagcaaggcttgaaccagttggagatgttatagcttacttattcgtaaattttacaaggcgtgcacttgagacgaggcgataattagcttcgtgatcatctcttactgacgagatcatacacttgttttcatcaatgcaaagtcaccattcatgttgtacccagctcgttgcaacctccagttgccgctttcgaggaagctacgctgtagcgcaccgcgcattttctcgcgcggcatagggcgtgatgactcaccaggcacaagcaattgaataactagctgtaatagatgaatgtttcgtgatgcgaacggccagaggctccgccattcatggggtgaagacggcgaggacgaacacgcgatggagaacgcgtcgtgacatcctttgatcttatcttattttggtaagaatgatggtattaacctctggatggtatgagatctcgaaagcgatttggctaggattaccctgtcacgttcatatcccgctttctctgtccaaggcttgacaatatgacgcgcaatcaaatgagaatcgaattgcttcaagcagaagtcgacgaaaacgatcagagtttctttcgtctcctggtcaacgatcggaacataaaatatgtcactatagaccctggtctctatagtgttgacgatatgtatttcggcccctcgctggtttcacttctacccacccgctggagattggaacgatggactggtgaccaaaaacgaagcgaatggccaaccccactttgcccgtgctattcggtcccttttccctgtcgtttaaaacacctggaatgaaacttttgttgatcatacggagatcccggtcggagaaaagttacgaacgggcgtttgtgaagtcagatgcaatttgttcgacgtggttgtggcaacattcgcccgctttgactaggagatccaatatctagagagtgagaccacggcttaccaatgaattgagggctatgatatcggcccacgattccttggccatttgacggaagatggccgcgtgcttcggattcttgatggaacgcatcaaggatgctagacatgctggccctcgggacctcgagacctgtcagaaggcattgtctcgattacatcgcctagggatccaccatggagatacaaaccgattcaactttcttattcgtggttcgcaggctgttttaatcgattttgactcggcacgaaagtgtggcgaccaagatgcgcttctgaaagagctcgaacatttaccgaattccctaaaggatttatcacgtcgaggtgggggagggctcctttgaatagtcagtccttcgaatgcatgcctctggtttttttgcgtcgtctttgatgccagtctggtttcagacaggatcgggttgaaattcacatacttgtacgaaaaggcgcttttttgcatcgaagatccctctaggggcggggcagtgtatcagcgaaatcggctgttatggtggagagggatgttcgtcaagaaggtaaactttacctgaccaatccaagtcctatctttttgatcgactagcagggtggcacggcagaccttgctggtaataaatctctcggtcaacgatttattattcaagctggaatttgaatgatcttcccaaagtcggttatttcaagtaaatttcatagttcttcgatcaaacgcgccattctcgctctattagctaagcattcttcaatcacagcatttcatacttagagataggttatctccaggtaaatgtttgtctacttatgtagcatagaccgaatataagatctatgcagttcggagactggttcccggcagaagccctctcatccaccgcggttatcgggccaaacatggagaacttctcagaaaattcggagatgacccttatagaataaggaataaccgagaaatatgtatattgaattcttcagaggcagtcggtgtttctttggccccccgcgctcggagttgtggccgagatccaaatccaaggcttccccggatcttcagctttattagcaacgtgctgcccctcttctctgttcgatcagataccgggaaaacatcctttttactagtcaacattttataatatcagagaactcagctatgtatggagttgccccacacaaacattcaaatggtctttttactcacatactacaagggcttatacagcatcgtttgctttcttcgaagccctctgggaggtatgtatatgtacaatagcatctttatacaccaaagcgtccattctaacctctacaaccttagggtggcgtcagccatgtctttgtcaatttgggatcagaccacccctccatcctcgaggcgatggtgaaaggccagaaggaaaagaaaggccaattccctactataatcacctgtcccaatgaggtacgttagcaattgcattatgggacccaccaagcctaacggcagcacttcggttagagtcggtatgaatgtgagccccgctgacgatatgctgtttagatggtggcactgtccatggccgacggctacgcacgattgaccggagagccgcaagcagtaatcgtccatgtcgatgtcggtacgcagggactcggagcagcagttcacaacgcctcatgcgggcgcgccccggttttgatatttgccggtctatcgccttacacgatcgagggcgagatgcgaggttcacgcactgaatatatccactggatccaagatgtgccagaccagaagcaaattgtcgcccagtactgtcggtacacgggtgagatcaagtcgggcaagaatgttaagcagattgtcaaccgggctttgcaattcgcaactagtgatccacaggggcctgtgtatcttgccggggcgcgggaggttatggaggaggatatcgagccataccagctgaaccaggctgtctggggtcctgtgtcaccggccgccctaccaacctccggcgttgagttaatcgcagctgagcttgcagctgccaagcgccctcttatcattactggatattccggaaggaaagcccaagctgtgactgagctggtcgcattggcagatagcttcaagggaatccgtgtgctagacactggtggtagcgacatgtgcttccctgctaaccaccctgcatggttgggattgagatatccaggccatgaggcagtgggaacatctgatctaatcctggtggtagactgcgatgtcccctgggtgcctacccagttcaagccgtctgcgtcggccaagattatacacattgatgtcgaccctctgaagcaacagattccagttttctacattcactcgatggctacattccgcgccgacgcttccaccgcactcaagcaaatcaacgattacgttgcttctcgggaatctctgcaacaattcattagctccaaagataatattactatgggccagcgccgagacgaggagtattcaaggcgtcgacaagagatctccgatctggctgttatcccggagggcggcgacggggcttccttgaatatccactacctcatggcgcaggtccgcgagggcgttccgattgataccatctgggctattgagtccgtgaccatgacccactttgttgctgatcaggtctcagctacccaacctaagtcgtggatcaactgtggaggtggcggtctcggctggtccggcggtggtgcgcttggtatcaagcttgctagtgacatacagcagggaggacgtggaaagggaaagtttgtctgtcaggttgttggtgatggaacattcctcttctcggtgcctggatctgtgtactggatcgcccgccgctatggaatccccgttttgacaattgtgctaaacaataagggctggaatgccccccggcgaagcatgctgctcgttcatcctgaaggggacggctctcgtgctacgaacgaagacctcaatatctcctttgtgccaacgccggattacgccggtatagccaaggccgctgcaggcggtgacttgtgggctgggcgtgcctcgactgttgctgagctcgcccggaagctcccagaagctatccagagtgttctaaacggaaaggcagcggtgctggaagcacagcttgacgggaccgcaggaaaatatgtagaaagctcgtgagaaatggaatttggagggcatgaggtacttttagagtactagcggtccatagactgttcaatgagagttacaattcatggagtaaaaaaagcgagatttcaagagatgtatattttgtatgcaaaacacatgcaaaagatacctcgtgaaaaaagcatcggtaccccacgcccttcgacatgctagtgcctccaattgatagaaatacactatctgtccaagctattgaccccaacgtcaaataggaagcttatcaaaagtgggctgtactccgttgcaccgtaaatgagtcatctggttcggagaacgctggagagatagatttccactccgctttcgccgagtcgcccttcgcagcaccttcgattgctcctgtttcgtttttcttcttaaatagtccactgtcctttcacacaatcaggccaatactattacgtcctacgaattcgatatacaatataccccgatataccaaacacccctccgtataaccccgcgcatacccctccgaattccgcatttcgcattcacaccgccaccaactcaattgctcaatcacaatgagtccaccggcacctcttgatgtcgacctggtgggcgtcaccgatacctcggctgtccctgtcccagatcccttaaccatcaatggcgtgtcagcatggcgacagaagatggccaaggtccccaccggcgtggccgcgccatccaacagtgacatgttcaagagtccggtatgataactctagattgtgcataggcctcatggagatatgaccaaggaaggcaatcaattgcaggatacagaatgctgatatgtgtctgaggcattagatttgctacacaaagcctaaggccaagcggtttgagcgtatgtctacctttgccctttgcgtgtggttttcgcaattattcccctgatactaatcattcgtttgcagactgtttttcgaccgaagccaagtctcgcaaggttcgcacccaatcgcgcaatgcgaagtccacacttgctaatccttccacaccttaggcgtctactttgaagactgctgctcgttacctgaacaacccaggtaatactcccggatacttctctttcggttcattgattaattctgtgttcaaggccttatttcgctcggtggtggactgccctcgcccgaatacttccccattgaacatttggatattaaggtcccgactgtccccggattctctccggaggctactcgggagtcaggcacggttcttcgtgctggaaagcaggacattaaagatggaactagcctttacggtgagtccccgttctttatgtgcattagaaatggccatgactgatccaattccttagacttggagattgcccttaactatggacaagctaccggagctgcgccattgcttcgttttgtcacggagcacaccgaagtgagtataaaacaccatatctgtcgtctgtcagcagatactaattaaattagatcatccacagccctccctactctgactggcaatgcaccctgactgctggcagcacctacgcctgggacactgctcttcgcttgttctgtgagcgcggagactatatcatcatggaggaatatactttcgccagtgccgccgagactgccttcccccttggtatcaaggccgtgggcatcccaatggacgggcaaggcctcatcccggaggaaatggacaaaatcctcagcaactgggatgtcgccgcccgaggtgcacgcaagcctcacgtgctatacaccatcccaacaggccagaacccgactggtgccactcagtctgcagaacgccgccgcggcgtgtacaaggtcgctcagaagcacgatctcatcatcgtcgaggacgaaccctactacttcctgcagatgcagccctataccagcggggatgccactccagtgcctcccccctccacccacgaggaattcatcaagtcacttgtcccctcgttcctgagcatggacactgatggccgtgtcgttcgcctcgagtctttctcgaaggttatctcgcctggttcccgagttggctggatcgtcgcctctgagcagatcatcgagcgcttcctccgtaacttcgaggtttcctcgcagaaccctagcggtatttcccagatcgcgctcttcaaacttctcgatgagcactggggccactccggctttttggattggctgatcaacctgcgcatgtcgtacactgctcgtcgcgactcgctcgttcacgcctgcgagaagcacctgccccgcgaaatcgctcactgggaagcccctgcggctggcatgttcgtaagtattccctgtctattccactcacatgtcattcagcaatgaatactaatatctaccagcactggatggaaatcgactggcgcaagcaccccggcgttgccgctggcaagactcacgccgaaatcgaagaagagatcttcttgtccgctgtgaacgacggcgtccttctttcccgcggcagctggttcaaacccgaccacgacactgccgaggagaagatgttcttccgcgcgaccttcgcagctgcttcgtcggacaggattgacgaggctatctctcgcttcggccaggctctgcgcactcaatttggcctgtaaattggttcctgacctacgattttgacgaatctcttttatcataaagaggatgcattaacttgttagttttgtgattttagatggtagatatcgcagttttataaagggcgggttttcattgtgttctagagaagcatattgcattctctctttttggttaacttttgacctaaatagtcaacaattctattgttttattcttctatcgggattcaatatcgagtcgaaagaaatataataatgcacaaaaagaataatggttggtatcaggcaataataaaacaaaaagtaacaataaaggatgagaaatatatccaaacgaatcaggagcattcaaggggatatcttcaaaagagaaaatgatcatgaccccagaatcttgccataagcatcctccacctccttagcaatctccaacagcgtgacaataatgatctggtgcgtcacattaggcagcttatcacgctgcagcccaatccactccaacggcggcgtagcctcacccatatcccgcagctgcggggtctcaataatcggcggctcaagcgcagtatatgtatacctggactggggcacattaacaaccgcagtgatcttctcctgctgctcagggctagtaccactcccttcaccactactagtgatgcgcaccgcagacggcggtaagggcttgccaagccgtgacgcgagcgcccgcgagtgcgtctcccacatatcgcgaatgaagctgatgcgcgagtaattccagccgacatcgactttgccctcgaacgtgctgcggaatatgtagtcgatctggtggcttcctggagcctgccaggtttccatgctcgcgactagtcgcggtactttgaggattgttccgccgcgagatactgcggctcgctcggaaatctcgtccaccgagagctcgtcgagttgcgcggatgtaggccgcgtaatgccagacagcgctacgcgaagctggcccaatgttaggcctagggcactgtggattttgttggcttcgagcgagacggagaagcgggcctcggcgtcgtgggcttctaccttgaagatttggttgtcgaagaatgagctggggaatgctcccaggttgacgtggcggatcttcacgaccactccggtgtgtagagagatgggtgctttttcgggcttgtcgtggtctttctttgcttgattcttggcgctgacatcgaggcgctcggtgaggacagaagacttccggcggaggtaccgctctacctcgcgtagtgatgctttgtaggctgcttggacgtcttggatcaggcgctgccacgcctggaatagcgccaatgtttgtgatgctgtcagagatgtgcagaatagctggagtttgtcgccttccagaatactgaagaggcgctggctctgcgcgccggatgtatttcggacattgtacatcaagaaattgaacatggcgatctgtgcaaccaagaaaggttggtaatcgaatgacaccttggcttggaggtgttggaaggcaattgtggcttgaatcaacggtgtgtgccctgcctcacaggactcgggccattcaatggaggtatgaatcctcagcgttctgagttcgacaattccactcatgcgacccttactctcgatggcaactgagccaaagtttatacacatgttctgttcgctgtcagatgtcttgctggtagacacccacagatcaataatggcgaactgtgccttgcctagggtcgagcccaaatcgagttggatttccaccttctcaatcgcgatggtagtggtccaggggaatgcggacgccgaagcaacctgctggtagcgctgcacgatatagctttgtgtttcggacggtcctggctggacgttctcactcgaggtggtttcattgtcggatggaagccaaatttccttgaagagcaaagagtcttgaacctgtttggcattgactgcgaccttcattggactgacgcgcaaaatagctgacattccgttcatccggccaaggtgcttgctgttcatcaatgacagcaccatggactttacctcgaagcttgcggttgattcattggagtacacgtgttttacagatgcttccaagctgttgaaagctaaagagagagcaaggaaccggccatggtcttccgagaggaccgtgttgacagtcacgtagacactctcaaaccttgcagtagctgcgactcttgcaataggctgacagcttaagctaaattcctgtttgtaaaatagcagtcccacgtttaccttgcaccgaccaaggatgctggttggatcggcggcatcaaatggcttttcctgcattggtttctgtgtctgaaatttcgctgctgcagatggctttcgaggctggccctgctggttgcccatgatctccttgactgtggcggtcatctgcttgacgagaggaacaagggttggatacaatgtatttgttgaggggtcgaccttcaactccgcattgagcgcaggatcgtcggtgccgttgtcctcgaattggactttgagcgccactcccggtgctcgcagagttgctgtggtcgctacatcgccttggacatattggccatattttgcgtcagagagtcggctacccttccatgtggccgctagcaatgtctggtgatcatggccaagttttccttgaagcgtgacaatagcgcctgcaaagtcaacatcgacgaggagagaccgcaatcgtctattaccgaaaaggctgcgatctttgttggtattggtgttttcgggtgagtctgctttggttgcccaaacagccttgccttcacgaagcgcctcgcttgctgtagacattgagtcttgtatcatactagccggaatgataaactccgatgtggcgcgtatgtcgagggatttgccagctgcttggaaagcaagacacacttccttccctttggaggcatacgccacgttgaagaccagctctggcataagggctgaattgagcgagcgcttttctctgtccgctccgaatggtaccatctgaagttgcatgttttcgattcgaagtttggctgcgttcttcttcttgttggacagttcgacttgttggattgaaaagaccaggttctcgggctgtcgaccagattttctgtggaccgtggtcatgttccaagcgatctgaatggctcggaattgtaaagagtaaagagcatttaggaatgtttccgggctggaatcatcgttgacgtggatttcaggggcagcggtggctccgtcttttgtgtcaatgtggccaccatgtcttaatctcctaagacgcttgacttcatgggaaaggtccagggttttgatgcgctcttgtgtatagacggcaatatcgaccacaagggctgctgtctcagcggaaagttcgacatcgaacctatcgctagtgaaatggtatgctctagtgatctctccattttggcggatcgctgatgttccctgaagcttcactccagcagagaaacctccgtatgattgactgctagccttttgttgttttcgaagctcaaatatgatctggggagcatcgatattgaactcgggatgctccatggcgtatccccgatcgagtccattttgaagtcgcatacgcatcatcccaaggctgaagatcatctccgcagagtagtctttgccctttaggcctggtgcaatggcatgaatctcgaatccagccattgtgagacgggatttgtagaggatctcctggctgtcagatgctggcttgggctttggggataccttctgtagagacagcacgtctttcaggtgtaactggagaacatctaaattctgcttgatatcacaaaccaaatgggaaacatccggtcctgtcaaaacagcgaggagactgcgcacagcactggcttctaggcgaatgagttcaatcgtgatatcaatctccacttccttgcgatccggtaagagattagcaaggattcgcccgtttacgggaggtatttccagtatggacagaacattgaacctgtggctttcacccgatacgaacatgtgcgagttcttcttcacatcaaagtcaatctcgattttggatgcctccgtgggcatcactgtcatgcgagcgacctcgccggacagaagatagctcaaagatggtaaaagggtaaaagtcaaccgatagtcttctaagaacattgccacatggaaggtgtcacgagtgggtttatttgatgcgaggctctgaccggtttccggatttggtaccttgacactatccataagctgtcggatgtatctgacttcgtccgcgatgagtctatctgctgtatgtgctaggctgacagggtcttctttcatgtcataacgaagctttctgcaggacccagctatcttccaatcgtgtctgcactcgttgtcatcttcctctgatgcaagcgaaaggtacacgtatgggtcggcgattcttgacaacatcagagtagtagattggctttgaagctctgacgagcatccttcagcgctaaacaatacagcgagatcttctggttctttggcaccaagcgccttgtgaacgatcgatcctcggagagccttcgctattagagcaagcttaacattgacacagtcgagagtgatggaaccaaaatcagtgccaaacattatctgcagctcgatcggtgtcttctcttggaccttgtcaattgggacatgacccggcgaggatgcaagtgtgatattcgacatgaccttgatcaccccttcagcgagatctagaatttcccagcgcagcctcagggctgttgatccacaataagactgcagggtgatgagttgcttgctccccccttcaccctcaggcgcgtgtggagcaaatgatgcaacagtggacaaattccctatgaccaaatcgctttctttcggaccaggatccatggaaaattggaatgtttgaattgtggaggatatgaacatcgaaggctcggaagtctgccgttcggcggcgtgcggccaaacacggcgcatgacatagcttttggcaacatgtgccaggtcccaagcccgccagcggtcgaagccggataatactgcctttttggcattcgccggcagaggaaaattctcacacaagcatttctgctccaactcacgcttctgatgagcagacagactttcataaatcttgcgaatgcgagatataatcttccacgagtcatgctgccgcaagtgagtcgaagcaaccctgaggacgtacgatatgcgagcaaggaatattggatccggtatatcagtagccgattgggtgagggagtacaggaggtactgtaaacgcttttcgctggacgttaaaatctgttgaaaggatgacgcgacagaatcaaacatagtcgttgctcgacgaacgagaaatgcaagacgctccacagactttgctgatgtcattgtattgaatgttcgcatctgaaggttagagcgaatattgggcgaggtcacaagccagaaattcatatcttccatgtgtgagttaaacacagctttctcatggaaagaatctgcgcgtctaccctcgatagaaattgaaacataatccgctgccgcatggaccgttacaccttgtttgagaccttcaagtaaatcacctttctgacgttgaacctttcttcggaactcagtatgcagacgacggatatctaagctgtattcatctcggaactcgacctgattgttgttgggagccgcagacaggtcaaccagtcgtaattgaatagatggaacataaagagagacagctgttgaaattctcggcttgctcatggcattgtcatagccaacgatggaagatatcacatccttttgaagcgagtcaatgattcgcgtaggatgctttggttccaacccatccagtaaagtagctagacttagaaggaattcgggtgtacaaaaccctcggatcccgagggggaggttgcacgcaaggtttatgtatttcgtttgatcgtcatcaaatgtgagaaacacggacttttgattcatgcttgagtcttcactcattgtgtcatcctcatccacaaatggcaatggaagttcggatgtatccagatgaagcttgtagtacgagaactgtggcattatccacggatttgtgtctctagtcgtagaatgcgaggatgcgcctacccgaggcccgtaatttggtccatctctcgaccggttggctttcgagacggacgcgctcgatcctcgggtaggcagaaaaggccgcgatttggaaatagatttcgaggctgctctggggctgttgacagtgtgtatccggacacttttcatacttgatgcttctgactggacaaaaaagctcttggcacttctagtggtacgaggacctgaagctccttgatatgatggtgcatcaacagagccaatcctgtcatgaataggctcaggcattgaaggtatggccatagttggagggaatacgtcgtcgtcagaaggaatggttgaagctggcccagtctcttcccagtcaaaaagcaaccactgtgccctgtgagtacgttgatcgtgggttctgatatgttcttgctgaagtcgtcgactttctgcaatatcggatttgcgtaaagccaacttcaccccaattgtgagctggaaaagtcctatgggagataacattttttcccccgccgatggattgcattgagagacagattggcgatcaacggcagcgattgagatatccggaacgagaagactcatgcgtttcgaaaatttggtgtttgcccaatcgttgaagttcacattcaaaggctgtgtgctcaaaatcacagctgtctggtctagtagcacggaaatatgaattgagtcaaccttggccctcaagaaagtcacgtcaaatagaagctccgggaaaagcatcggcaacgcattttcctcgttgtcaaaggagaaatcaaagctcttcaaagatgaagccaaacaggccaagaactcggtggagcattctccgacaattcgaccgacatcaaaatcccaattacaaacatatgttggttcaagcgggggcaaaccaaacagacgatggccgtaaaccgaaaccccatcgatgaacagctgagtgctagagatagtggaagggccatccagttcagtggtctccaaatcaattttcaccggggtgatggaaaattgcaaatccatatagtagttagtaaaacgcaaattcgcttcgagggaggctgcgctaagtcccatgcactttgagtgatcatagatattcacaggaagcaaggcacgggggctatcaaccgtgacgcgtacgagcacatccatgtcatttgactttcggtttgggttggtgcctgtcggatttgacggtggctcgtcggcatagactagctcttgatattcttcaagtgttctgaagtgcatttcctcgccaaaatagttttctctgattgtcatgaaactctcgaccaagaatccaaaaaggtaaagacgaggtaaagttccatcgacgttgagcatcagcgtgtcagtcagttccggagatgttgactggaaatagttataggagccgtcaatgaacaaattctctagagtggccatggatttttgcggtaaaaattcatgcaaagtatcccacaaaggagtcgtgtagtccacgccgccgtcttcaaggtttaccctgaagtcgatggcattttgttcaggttggtatttgtccaatggtatcatggcatttgccgccaggcgcttgcctttgataacaagaaatcggttgtcctctaaatcagaaggattgctgataatgtttcggtcgttgacgttgatgtaaagttggaagtcggagaaattgagatcgagattgtaaataaaaggcacaaatgagtagtagtccgaaggcggtcccgaagcccaatcgcttacaagatctgtgagaaggaatatgtgatcacgtaggagaaacagctgtaggtcgtggttttcggcagtaaatttccaggggcgaagaccattccaggaaagtgggttggatagatcacaagtaatctgttgccgaggacattgccaaagcaagccatggtttatgctggatgataatcttgactctcgcaagtcgatagaaagtccattggaaaaccctgtgctggatcccaccatatccatggtatagttgatggtagagtcggcgccaacacaaagggaaagccacccaaacgggcgaatttcagggccgaggtagcctttttcaccttctttagctcgagtcgtcttctgttcgtttggcttctttgttctcgatgcacccccaacggcatcagcacgacccttccattgccaatccttggaaggctctcgtgtcggaatacgcaatgtcaattccctattgatttcaatgcgcaatctaaatgccgtgctttgtcgcagagcacccggtgctagtttctctgtgggctcagcgttgcgatagaagtttggaaaaaagacattctgcaggccaacccgctccctatcagcccagggtccgtaatttatcgtaccgccgtgaatcttgaggtccatcccccattcgggagaaggagcataattgatattgctatccattgattgagactgagcagctgacggtggttgaataatgactcgtccagggacgtcccagaagtaggctatattcagcatggggctatccacgatggtagagaacctggcatattcgactgagttccacttctcgtggtcatccccactatcttcgtccagataccgagagagaccggtccagcggacctcaggaaactctgcctggctcctcggcatactgttggcgtgtctgccatcgtcgtggaacgattcgacagatgtctggaaatatgggaccaagtctcgaatactgtgccatactctgcgcctctgaaattggtagttgaagatattttgcggtcttttcttcgatgcgtggtctttctcttgctgcgcacctagatctttggcggtcgccgattggttctgcttgaagtccgggtttggccgcatttggaccactgcattttttacttgaaatgagaatatctgacgatacaaatcaagaggacctgaattggaagcgtcgatggtacccattccagtgtcgaacgtggttgtcaacacagatcgagtatgctcattcccgatgacaatggctcctttctggcaatccagcttcataggcaggagttgtaacatgttggacacaggatccgacagttctgatccacgaatagtagtcttttgcgacgcaactccgctcctctcactcgtgctgcgctgtgacaagggttcgatggttggccgatgtccaggcgtatctttaaaatcaaaggcgttgctttcgttgccgttttctgccgccccgcgagatcctgggggatttgaattgtcaccgtctaaatcaacatttttggaagagtatccaaacccagtaaggatactgtcataggcaggtgtccggttgtagatgaaccattcaaggccatatgtgttgatagtaatccggcacggcaagtcggtcgtctttcccatgccaccttgctcccccagattgtcgtccgttgcatcgcgcgggcacgcttcttcccttgaggtatgatgagcaagacctgtcttgcgtcgaatcccggccaaatcatttcgctcgactgtacgcgtccaatagcgccatgttatgaatcctccatgaataaagatggtctcgttcaccccatggtaccgaatgcccttgaagaagattcttccaccaagtagggagacttgaagtgcgtttatatcaacatatgcgcggtagtaatgccatgtgtatgatcgaatcgcgtaggatatgaggttcgcgaagagtcggttgaagtagagcaaaaagaacagagcgctataccgttgatcagcgtaatccagtcaagttggaatagggcaaacttacagaatgcaagagacaatcagttctaagagaaagaacctagatcgatcagtataacagccatggttcaagcagtccaagcagcgattccataccaattgaagcttggatccggcgtcaggaaggtcgatgtcaaacttgtactacccatctctctccgcctgtcaacatggacagcgccggcgcgatagaacgcgaatgacgagccaaaattgacctctcaatcatcgacaccaaaatggctggtcaaatatcgtggaagtcgcaaggcgaggacgttgataaggaagaccgagagcggtgtcacgcgaggatcgtcatcggataacacgcctcctcattccgaactaacgctcctctagcttgttctccccccatttcggtcttgactaacatgttttgcccctctatcgactctgcggaatgagctggattacctccgtaggcagaaaggggtccttaaaccgtgtttccccctaaatttcagcaatcatgacgaccgcagctggcggaggaacaggctccagcctggcacgagcaattatcattgtcacaggtgtctcggctttggtttcctctctcttgtcctttgtgtcagtctatccaatctttttcgacctaactcatggtcgcgctcgctgtaaactccccggctaacgtgttgtctcaaaccacaggtccatatggtttcaaacgtacgagcttataccgtccaaattcgagaaccgtggctcaccatatatatagcaaaaactaccggaaacccttactccaacgctacgttgtgcgtatattgttgatgttagtgttgactcgagtatcagctcagggggctagggcaaaaaacagtgctgattgaacttagggtcccgatttacgcagtatcatcatggacgagcatcatatcgctaagggcggcacagtttctagatcctgttcgtgacatctatgaggtatgtggggctctggccgactgtccgataagccctcattaacgaatggcattggcaggcgttcaccatctataccttctttcagctcctcatcaacttcctcggcggcgagcgggctgtgatcatcatggctcatggccgccctcctatctcccatgcctggcctctcaatcacttcctcccaaagattgacatctcggatccccaaaccttccttgctgtcaaacgtggtatcctgcagtacgcttggttgaagcccattctggctctcggctccatcataatgaaggcaaccgatacatatcaagagggctatattgggctgagctctggatacctctggacaggtatcatatataatgtcagcgtcacaatcagtctttattcccttgccatgttctgggtgtgtctgcatgatgacctcgcgccattccgcccagtccccaaattcctctgcgtcaaactcattattttcgcctcatattggcaaggcttcttcttgtcgatactgcagtggctgggagcgcttggtagtgttgctgggtacacccccgacaaccttgcggcagccattcaggacagtcttatctgctttgagatgccattgttcgctatggctcattggtatgcattttcgtggcatgactatgcggacccgaccatctcagctgcgcgcatgcccgtaaaatacgcgctgcgcgacgcattcggcgtgcgagatttggttgaagacaccaagttcaccattcgcggtaagaattacggatatcggctgtttgactcgggtgataatatcatcccgcatgaggagtcagggtcgcgggtcaagcgagtaatggccggcatgagatatgagcgtggaggtaaggcaaaatattggatcccagaaccgggtgaagccaacagccgcacgcctctattgggcggcgaatccagtcagcgcggccccggaaataaacgggccagtcaaacctccagagagagaatccgatcatacagtgaaattgatgaaaccgcactggacgacgaggatgagcgaatattcctcaatgctcgcgcactagaatatggagactggaatgtgagttacgctgatacagagtggtcgtgattgcaatgctgaccgcgcatagtacccggtgattaccgccaacgtggtgccaagtgaccaacggctgccaccctcgcggagaaatcaagattcaaaccgaggggcagatgtcaaaaaggcccataggcacaggaaaagtcgcgcgtcaaatggtgagagtaggcaaagtcacaagccaaagtccaaaatagcgggcccaagctcggcgactcccggtcccttgaagcgaaacgtcagttccaccagttctagcggtacgcagcgcagccagctggttgaccttgtggtggagaatacagaggctgaagaagaagttcgagcccaaacacagagagagtatggctctgcctgggcagagcctgaacctcgacgattctcgtaagttgccaaatcgcgcatagcgacactagaggcttcagagcagagttattaatcccgactccaacctccagaagaccctgtgaagatctaatcgaagaagaggctgaagccaactcgatacagccggagaccaatcatgacgaagatcggcccaaatgggcctacgacgatctagagcaggacaatgtttggggcaaatagtgcgcgttctatggtgtatggtgtactctgtctcttcaattatctcggattatgatcatctaccttatttactcatttgctcattctcggtctgatatgtttgtatctgtgttctgtacatatccttcgaaatggaacagaagaaaggaaaacattatgaaactccgagaaattctaaagagatagaattatcctttccaatctctgtaagcgcccgactttctcgtcacaccaaaactggacttgataggcttgagagggtgtagctcaaaataatgagcacagatgtgataaccccactagacgtcaacgaatagtagtgcttcgatcagctctgctaccgacgatcaatgctgctaaatgcgctggcttcggcgtgcatgtctttactgggcatagaccccggttactagtgccacgatgatatgtacctggacgagttgggtaaggcgctcatctttgggcttatatgatggatgttcccatcccgtctgaggggctgatttgactgcctgtgcaactggttcgttcctttcctttgttttctcctttctttccctccaaggtgatggattgatttctcgcgctggtcgccatcatgctggctttggagagggcggggtcgttattcactggctggatacgatcatgctttacatttttacctggtgacgatggttgtcaacctagacaagctgggaacggtatgtgtccgactacgtcaaaaatctagactcgatgggactaatatacatcgcaggcgttgaacgggagatgaaaatatgccatactcaaccacatcttgttccacctatgaagctggtggtatacgataacctccccagtccaagtgtccatcaatctcgaaactcactgtcatcatggttcaacgacagtcggaacttggcgtcgcgagcctctaaccgggcaagcatgtctttaaaacgctcttcaacgaccccattgaagatcagcgcaccttcagactttcgcagagtgcaatcgttccacgatcacccacattcattcaattctccgccaccaacctatcaaccattggatctccgcattcatcgatcaggtaatcgattgtctgaattaccttcattcgaaaccttccaactaaacgaaagccctcagcgcaagacgctaccggtaccccctcgtgccctcacgactccgaccaacgttcgtgatcgatattgccaaaaagcatttgtagtctctcgcaagccagttgggtctcagaaacgccgatcacttggtaatatggagtccctgctcgtcgaagaacccgttcgcgccactagtactctggtaccacatttctccaaggtcatccacaccgagaaacctctcccagaagctcaggcagcatctccaatccacggcaggtcaaaatcagaaggaagcaaggttacgtcgaacacccgatggccaaacgacgcaaataccacctggggcagagtacctcggactccacctgcatccaacagtgtgcacagagactcgccggatacatccccatccaagtactcggcaatgtccaaggacagtccttcgtcagccagctcgcgcacgatgatatcacaaccctcatcgcgccgtccctcaattccacttcccaagaaccgagactcaatcgatgcaatcccattctctctttccaaccgcgtaactcaatggatgtgccctacacccaccaactcctctccgttccccaggcaagcctctatgcccggcgagaaagggtttaattgggagcgaacccgcacgctgagtggcaccacagtggcttcgactagtactacgactttcaccggcggcccaagaacacggaataatggctccatctctagtgccttctccagtgctattactccccgcacctcattccaagtcctcccgtctgctacagaaaaagatcttgacgctggtgtctgctacccgaccatcttcgaggaccagcaacagcaccatcacctatcttcgtatcatgacaatggacatgtgcggtaccaagagtctagtattggggtggcgttttaagttgtctggattttctttggagatgacacttttggccattctgagattttgataatgagttacccagtctccttcttttctttctgttagaattttggtttttcttggatgtctgttgggtattttcttttggacttgttttatttctattgcgcgttggaataccccgttgtgattccagttggttagttctttccaaggttgctatttgaggtgattaaccgtggtacatacatagcttatgtaggaagtaataatgaaaacggtctggatatgactccatgggatctttagcagtcagaaaaggattatattcagtattctactagggagaagaacaattatgcaacggcaacacatatttcaaggtccaggctaacacacatggcatctgaccacgatgtctggacataagtcaattgtacacaaaggctaacgatagctatttctgtagggtatctcaaaaaagacaatatagctgtcagaaaaacaaatagggcacaagttaaaagaaaggatgaatgttatgtacaacatacagcaaaagatcgacgtcttagctttcatacgagatcaaagctttagtccgtgactatatccacaccgtccggggaagtacttatggggccgattttgcggggtttttgcatgccgagaatctcccaggcacggcccatcataccatggcctgagccctggggaaattcgacagaagccttgtgagcatgtctggagacgcgatcacgcatggtacgctcctgcttagcggcagccagacggtcttgttcacgttcgtgattgacaatttcgtcgcgccattcggcccagtgctcgaagttttcgcgctgctggagtacctgataacggaggcgggtcttggacggacgccaagcagcgcgacccgctttctcattgccgtcactacctggaacagccatcgtggacttgagatcggggacacgggactcttttgtcagtttgagaagatgggtcatgacatcccgactttcgagggcagtgcgttggattttttcttgttcgggggttggtttggcacgcacgagcggcgcatcaagccatgcgtgcatttcactagatctctggacggagtatgggtcgaggatgttcgaacggcggttttcctcgcgcaggaaacgcacagctgcttggaggctttccacctcagcgcggagagactcgttctcgtccatggcagctaaagaggcctcactagcgatgatggcgctgttacccgtgggcgtcagacctactgttccagacatgcgcttcattcgatcaagacgagccatgaactcatctcgctctgcttcggctgtctgaagctccttcttttgttgctcaactattttctcgagttcactccctgctttctggatttcctcgattctggcttcgagttctttgaccatggcagccttcttgctcgcctctcgcatccttgattcaagatgctcgatctttaggccctgttcttcaagggtattgtccttgactccaagtgcggctgacgcttcgtgaatctcatttctcaactggcgaatctcctcgtctgcatccggggatgtcattttgttggacttcaattctgcagcgcgagcgacccaggggaatgcagctctctcgaactctgtcgtgcgagacagatctgatgaaatggtatccagctcctcaaattggtcgcctacttgttgcaatctggtaaataacaatgatatagggtcgttactttcatccaggatttcggaggacgaggcaaaggacacggcagcctgggacatacagtccagaatctcctccgggctaaatgggtgcgtgcgaccttcatcactggtgaggacaacaaggttctcgccgagctttcgagcaaactctgaaagttgcttggtttcattctctatcgtcttgaacggttcttcggcgtcctttgggagcgcaagtgacctagaacgcagatcatcaagagaccggctgatcttacccatcgcaaccttgtatccgcgggcctgagaggcgaaggtgtccaatttattcagagaaatcaggttttcttcgtcgccttctgccgcggccaccatcttggagctgataatcagcttaacgcgtgcgattgcaccggctgaatgctcaatgtacgattgagacaaatgggcccgcatacacagctcatcggcaaacatctccaagctggaaggaagaagggtctcagcaaggtgtgcgaggagagcgatagaccgctgcaattccactgcaaactttgcaagattcacttcgtccttcttcataggctcgatccagaagttcaacatgcgctccactggctccatttcgaacattgcgatcttgatattggcaaattcctcgggcgagcaagctgtgatatagttcacaaagcgatcacacacgtttgaaatccacataagatattccaaaaccacatgagcttggaaaagttcctcgttggagactactgagtgctcagatcccttatcttgtagagtgctgctcataacattggctttgaatccgacgcgcttgaatcgaagcaaagcctgaatagaattcttttccccttcaaagtactccggaagatagagctttatcatcgaaaggtgctgtgcattttcttcggactccatacggttcagttcaacatcgatagatttggtcagggccttcgattgattggcctggagtttcatattcaaatcttgcatctggcggtggcgcaatgcattttcggtggtctctgcctccgaaacttgctttgtcgtgcgcatatcatccaagtcacattgcaggttcgtcaccaaatccctgaaacgcgttaatgtatattcaaggtcctcgataacttcgtcctgttgcgtgatctttcggcattggtcgctgaacacactctctcggtactcaatttcttcttgaagttgcttctcagtctcaatatgggtgtactccatctcatcgctaatctccttgagagattccaaatcctcgatggcagctttcagctcattaatctcatcctggtagcgcatgtttttgtctgctaattcttcaatcatttcttccgcccccagtgctgtctccagctgctgcttaagattatcgacattggtctcagcgaccaaaattctctcctttgcagcctcgtaatcagacttgacggtagcgtactcctcgagatcctcctccaattctttgatctgagacttgaggtctaactcttgctgctgagtcatatctcttaaacgaatgagcgcctcgcggagacgttcattggttctttccatctgaagccatccatgagtggttctgtcttcgggggtggtctcctggctgtattcttcattctcctctcggagaacctccacctccaaattcagctcgtccaaccttgatcgtaacgctgcgcactcatgtttgaatgcctccgctgtctcctctgccatttcgcggtcaagagtagccatttccatgagcgattcatgctccgcctgcatgcgttccacgtcgtcagaacgagcctcaagttctttcaactttttgcgcagctcggtgacttccatttgctgcggttgatacttggcttgaagtttctggatgatcgtttcaaatttatcacgctcagcctggagttgctcgagggtcttcaacttctctttgtcgtcggctcgtttcttttccattattctgagcttggcattaagttcttcgagctcgcgattaactgcactgctctgcccctggcgttgagatgcagagagcggggccccaggacgcgaggctgcaggtcgcgaagcagtcatcgactgtcgagaggtcttcggcccggtgagtccgtcttgtgcaccctccccgtcagtgtcaggcgactcggtctcggttggatctccggatcccccactcatggccgcgtctcctccatccgatgcttttgcgttgctaacctgccgtagtgaaggacgctttgtcaatcccggggttgatgaagcaacggcactttgggagcctggtcttgaagttcggactgctggtccagataccgagggccgtgagcctctagaggctgttggctgtgttggagagggacccggggggcttctggtgctgggagctagtcgtggtcgattagatgccactgtagaggtgcgggaagtactcccgatggacgggcggcccgtagtcgttgcgagttgtttcgttggggacttcgtaggggactaaattgagtagaatcataggttagcataatggaacggaacacctttgtaggacatgacatactcggagagcggctacacccttcggcaccggagtaggagttgaggctgcattgctgctctgtcgccttgctgctgtaggaggtagcccagtttgcttgcgcataccagtggagatcccaggtttaggctgcgctttgctacctgcggcgctgctagccagtttggcggtttgtttactctccggctcgggctggacaatcttaacaaccaccgttggacggacaaacatgccgtgtcctggatagcaatcgaaataccgttcgccttggactgcgccatcgtttttgccggtggcttcatctaattcaaggcctatccactgtccgtccgcaaaatgggtgttgccaatgaaacgcactgttgctagccgtccatcgggcagctcaatcaccgtgcctacagataaggcatggccagacatttcgagtggattcaagagctacaatgagctcttgagcgatagctgagaagttctggttgttgggaggacagaaacacggcaactcctgagtccaacggagcgcgtcaagtgactagtttctgcctcaggcagaaacttccggtttacgatgtagatcactacaatatagttactgagtacacgcattattgatccaaaatactgctaactaatggcttctccgttgtattattatagcaggcttgaatcttgatttcgttttgcattatccagagcccttcatgttgtacgtcctatataaataggcccataatcatatacattcatagttgtaaaccaaaagtctagtgggaataaacaaagagtgtcgtagccgggtctaaatctaagcatcaccgctttctcctcactgtttaaagaactggggaaaaagtaccgggagctcttggaggctagagatcgtgtgcttcgaagccggcttgtgtggtacgggggtcccttgttcgactaggtgaacggtagtccatccccgagcatgcgcatgtacgcaattcaggtgtgaatcatctgatacggccttattagcatgaagagtccaaaaggtccagacatgcagtggagagtgacataccaacaaaatagcactgatccgtgcttggagcaccagcttccttctccgctttggcgtacatgtcctgaccaggtttgcacaccaagggcaagattccatagtcacaataggtaataccttcgaacagatcctcaataccgagtaacttcaccacacgctttgcgtggttaatatatgcgttcgtgagcagccatggtttcacctttgttgtgtccagggtttccaacagtttgcgcagcttgggatcaggcttgaggatattgtcaagaggtagcgcatcatcaacctcgtagttgaaggcaagcgggtcgatcttgtggtggcgggtaaggccttcaatggccagtccatactccttgtagtatttctggtgtagcatatgggcatcttccggtgtaaggtcgagatgtttgacaaagaaaacatctagcacaagtttactatattagtaagatagtctagcacactatgttggcttcacttactgatcaatgcctgcatttcatcgtggatgttgcaagctgcgtagaggagcgctctgttattagtagctcatagagagcggaagtcaagagcaccaacatttagaatagagctgtaggagcacatagtaattagtggccacaatgttgaatttaacctctcttgacttacacaattgtcaatatcgaagaagaagaccggccgtgagtcactgactccgttggcagcgttggttgacatcgatcttaaattaggaaatcgcaagggtagataatcaggtgaaagtctagacgaggtcacgataggtctaataagccaacaggaagataacgcaaataaccgatgcataagtcaaagagaaagtaaagtaagatcggcttccacttcttactagcgccctcatgttcccggcagcaatccgcgaccttacataatcggatttagcgccctgacggccggcatggtggactttttacgacacttcatttgctcttctatccaatcctcggagccttctcaatcgtagattggactgagtggatatttgacgtgggttttacgcgtttttagacatatctgcttccagtctctctcatcttgttctagctttaccgatccctttccctagctttcccaatgaccatggccgcgactcatggaccaacaactcaccttccagcaggtcctatggctgtttcagcctctacactggatgatgaggtacgggagtacgaaaaaatcttagccatcaatgaccaagtcttctcgggcactcaccctcggctcaatgttccccagcacttggtgcgcaagcctgggagaaatgtccaaaatgtccctctccaaactcatttacctaaaaatccccctccgacagctgtattggcgaatacgcctgtggttacaaccacaaaacagccttacaatagctcgcagagtgccgcggccagaaacgccttgcctgcagcatcacaacccgcccgtgtggcttcaaaacctacatccgagatcgatcctatcttcttgaccaagtcggatgacctaatcagggcggaactacagttacaaaggcagagattggaaagagcgctgcgtgatcaagtggagtccaagaaacaagagaccaaacagagacctgcggttcaagacacgaagcccgactttgatgtctcggaggttttcaaacaagctcttgaggcagtgaaaccagtctcgctgagcgatgcatctgaggccagtggacctggcggtgctgccagtgattccttcgacgacaattcattttactccagtagagctcccgactcgcctccgcagactggcgggcaacataagtcatcccccgtggctgtaattgcacctacaggacctgccgcacgtggtccggtaacccattatgcagatgagttgcagcgacttgaagctctcaaccgtcctggatctgatcaggaaatgccagatgcttaccttgttgctgaccagcgtcaatcccattctcagaagcagggccgctaccataaagcagaggctcccgtcagccgcttccgcgattcgcatcggtccgagatagtggacgaacccgaatattctccaccagctccagcagtgccgccagcggatcatggcgaacatccccgtgggttagaaactggtgctggaagaacatctaggctagatgcgagataccccgaccgaacccgagatattcgcaagcccccgtctcccacaaacgtgaaggtagttcgaaaccacatcacatcaccggcagctccccggccatctcgggtgtcacctctggcaactgccaaggttccttctgttcagcaagtccgggatgaacgtccttctgaccaggtgtactcggaccttgattctgctcgtggcagtcccaacccaccggcatttcaggtcatgtcacggaaacggagaaggctgcgtgaaggcgatgaaggtccccgtcaaacgtcgcacaggacacaaaatgcagaacccgtggaggcatttatcaaagaggagcctgtttcaccgccaccattcgccgatgattctacggttgttcgcagccgaaaccctgcagagcgccccatctacattgacatcgcgtcccctcaatacactcctgtatatgaaactcgcggaccgctggtgcgagagccagtttacgagattgacccgtaccacgagcctctatcagacgttgggccccagcgcacaatatctcgtctgagcatcagacggccaattcgggaggaagctgatcttcgacgagtcgccagctcacagtatgctcggcaatcagactatgctcgtgagtacattgaggcccagccacgcccagttcgagcggcatcatatgtggtggaacgccctctgcaagagcggtcaaggtactacgaagatgcccctccttacacacagcatcgttatattgctgcggatgacatgctgccctcaacatatcgggaggcttactacgaagaggcaccgccggtgcggatgatggcacctcctcgacgtcggatcgtggttgatgagcatggcacccagtactacgagttgccacaggcaccaagactgcagccgatggcacccccgcccccgcccccaccccggccagtctctcggatgtcaaaagatgtttatgaagaaagagtgcaccaccatgcgggcagtgttcgtgcgccttcagttgtgcaagacccctacggtgaacgacactatgtgcaggaaatgcccccgccccagcctgtctacaggcgagtgacgtctgaatatgctcgtcccgtagcagccgatgagagacaaggctacgctgctcctttggaaggccatgaaccttactcacgcagcagcagtgtacaagtagcggagtacattcctcgtcatgcggtctatgttgatgagcgtggagtgccccaggagagaataattcggacagccagtgttcgtcctccacagcctcactatgaaaactcgcatgaggttgttcagcgagttgggagcgtgcgaccaactggcccaggccgcgagcccagtatcttcagggacagacaacttggggagtatgttgagagaccgtattacattcgggatcgacggtactatgaaggtgaaggcgaagagggagatcacatcgcgctggatggcgcgaatgatacgatccagcgaggcccacagcgttattaatagcgtgccatgcttgaactttttcttctatttgcgcagcatttcatgtctttgtatttaaatgtactattccatcaattcatactttacgcatcatactttacgcattatcactacgtaccagattcgtatatcagatatcttgaacccaaggaaatttgcacatcagagggtggcagttaagcatcttataatctcagtcaattcctcgtgcttgttgaatatattggtagtagcagtcatatccacaaatcctcgtcggacattgttcttgttgcagctctgatctgcaaataaactgccaatctgttgtgtaaggagagaatccaagtggtagattgattttgctggatcatctagcttcggggacttgtgttcctctcacatcagatggctagatattttcaacattctgagtatcagaaacaaagcctttatcatcatttgagagttctgaatcaagtattccctgagggctgaaagtggatgtatggaagcatatcaggatatttcaagatttggagcgctcaaaaattctgcgggctatgcttgtaccttgtaatatttcttgttagcctgccatattcaattaaagtcgctgaattcaagtatcattcaaggaagaaaaaaaagaaacaatgaaatagcctaggctgcttccacctcgatcagattgagattaagtttgttcacgtggacttttcaacttcgcctaaatttatcatcatgtgcaagtaaagtagtggagtatggttgtgttgaaaacgaattatatatagtacctactagaatgatagttgtcgagagacaatgtgttcgagctttcgagaaacgaggcatgcaagacgcaatcctgcaacttctagcccgtgctaggtcggtctgatatacctgaatagaatactatcgtgattagctagtgatctctttctttgtcatgggagtagtatggcaagtgcatcatgattagtgacagcttgtatcggagtaattttgtatgacatggtaggttccatacacgatcatccgaattatcatcatcacttgcaatcattgcaataatcagccattgtgtgggagggcttaggattgataccttgttttgatgtgaaccaggtcacgatgaagaaggctgccagagtatctgggatgtcccattccgcaggcatatgaatagatgaggatggggtccaagaggaccagagggttggtccctactggcctctgttgccgtgtggatatttctcactgtattcgatgtaaacttgacttaaggaaccaggttatagaggaatggaattctgtcaaagcaaaagacccagattagctagttgtaggagtcaaatggggactatactggcccagtaaatttcaggcacatattgattttaatttaccactcacatctcgcatcagagtgacaacttcttcgtcatgtaactcggtccattcccgttgatcgtcatttgcaagagggcatattgagacagacgagggtcacgtccaagggtcataagccatgcacaggagtgaacttactacagggcagtatgtagcatctaaatgtgttgtgggtagtctatcgagatggtcagaacctttggccttgaccgtcattaagccactgatagaccgaattggggagagagttagttgatgaaggaagatgcagggtgttcgaagataggttgtaaggagaaagaggtaaacagaaagagaaacaatataggtaggtatggaaagctcttgctttgtttgcccactccaaacaggtcatacacacacagcaccattactgctattttctatctcaccccaattataattcattttgtaatcttattgacagtaaggttgccgcttcaggtagagatcggctcccggagcacagcctgagtactccttgagcacgccctgattcctactatgtgttgattataatggtgtagctctcttggtggggattgggaagtagagtgttgctgggcttataccctgtcgaagaatatgattatgttatctagagtggttgttgatatatgtatgatccaattgttgtattacttgacttagatatatattcctcaagtgaaatccattggatatcgcattcgtatgtgtcaattattgctccaagaatagaagagaatttcaaagttgtcatattcatgtattgtaggttctatgtgagcgaactagccaaagtcctcggacggtataaaagatagtgtccggctgtataaagatagtgtccggttgtagtacttatgcccactcatccctactcagcaaggcatcattagaccagcaaggcatcattagaccagcaaggcatcattagaccagcaaggcatcattagaccagtctccattccctctccgttatctccctgagggacagcaggaccgcagacgacggcacgaacagcccgatcgtctgattgcgcacaagcccaagactaaccaactgcccggcccactgccagccgcccatagcgtagcacggcatgaagacaccagccccagagtcgccagtgccgcaaactggctctgtggcctcactcagcgggtatagcgtcagcaaacgggccaccattaccgtcgggtccgacatgtcggaactatcagcagtgcgggcacggaacatcttcgactcgaacgggccgacacgtccggcgctgcacccggtgcgcgccccgtccttgtaaacgatcgcgccggcatccggatcggctggtcctactatgtggtgcagattgaatgtggctggtggacgtggcgcctctttcgtgacactcaagagctctgtcataacgtctgtcccccgactgttaaaccacctcccattatggcactcccatccgtctgcaaggcgtacaagggctaagtcgctccgccagccctgactattgaccccgatatcgccatggaccacagtgccacatggctccacccatgccgataatagacgcgcgcgactctgactgtctgcctcagaaacggttttgaacaactcactcaggatgtcaagccctccgggcgttatcacctgggtttgtttcttctctaaatatggtagtacatgatacgctgtgagggcatatttttccccgtcatcattgttgctggtaggggcgagaaacaccccaacagaacccttggactcctccttctgtagcgagatcgattgaccatggctaaggcggcctgggtgttgcggagggcgcaacatcaagttcttgcgtaacacaaagctgcgctggctcgcctcccagctttccagtccagcgagtcccaggatatcttcggcatcggctgccgggccggccatctcgcggatctgagcattgagcacaattgtgggcgtatcctggtcggggaggaccgcgagtagcgcggccgtctcgtcggcgctaacgtgaaggcagacgcactcgatccacagcctcttccagccgaacgggcaccgggtggcgagcacggtatgaacagtgcggtcacggcgtagtagattctcgatgtaggttaggtcgtcgtctagagggcgtaccggcccgcgagtcatcgatgggagcatcgggagcatatccggatcgcaaacaacttcttccgggaggggctccctacgctgtgtcatcatgtccagccaggtgtcctctgtatcaaccagtcgctgattgtatccccgcgggccgtcgaggatggccatggagcgccagagattgggctctcgatatgttggttgttgcgggaagacctgcaggccccagcggagcaaagaggtcatcgtctcctggtagagcagaagagatatcgaatcgataggctcggggtgtgggcagagatcggacagtggtaggacaatggtgccatcatcgagcgttgcggcgctgccttctgccagggcacggattgccatcagcacggtctcgggcgttcgggatgatagaatggtgcggatcttctctgcaaactcgcgaaagactgttggcgtggtcatcttctcccgttttacgtgtggcgtccagggagagtgtgcccatttgccatttgccgttaggctttgtgggtgtggttgcccgcgaggtgattaatgctcagcgttatgatgatagatgactccagtacgggcttcttgggcaacgatcaggggcaggggggtagtagcatatacttacagcggtcacagcggggaatatctaagttactgtggttgtggaaggcaggagtcgcaggactctacaggaaggcacgatcaacaaatgaaatcggctgggctgcatgtacggtacgagccacaggagcgatctatggcaccagcgatacaaacagtaataatttactggctcactatacaatgatcagcgagctgctcttgatcgcgcactttaggctcatgtcgatatggatggaggtggagtctctatggaactcaacgtcagtccgagtcccgactcccgcccgccgattcccacctcgacatcaaaacccgtattaccctgtgtattacccaggggtactgtatagcggccccaggatcacttcaagttcctacctaggattggctatttccaaagattgttatataaaaattatgcaatagaaagtttctggtagagaaagaatctctgtaagttgtcaaactgatttcggtcctccctgtaacttgaaatagttacagtcagtggacatatgtttttacacccctagccccactcccctatgattatataatatactgccggtcgaaaacccccatgagttcatactgtaggatcttgtacttcgcattttaggtaggcggtatactaatatggtggcggtgaactgggtggggcattaagggtgtagaaacttatgtccagtcactgtattttctttcgtaatgtaattacagaacttttgtccaacatgctcagccacgctgtaaacagatacgccacaatacccgaagcactgctccctgaccgaaaaagtgggccaaccgtatcacgtgcctcaatgatgactcagcctccggtaaaaagggctccaaaaacagcgtcccaggtagctattttcagagcccaatttaccgtcaactagcattggggtgaaatgaggtattgagaacttatactggtccttgattttctatatagtagtagcaaatggcaggatatagccatgctagatattgttgtagttgtggttgggtttaggtatcgccttgccgcagaaaacaataaatttgcagtggaaacttcctttctactgtgttaatattccaatcagcgtctgcatttgcctggccttagtgctttgacaacatagcctgccatcttgggtccaacttgtttagtagtatcaatgctctatcgtatcttagggtcactacaacaattgaacaattaatctagaagacccttcgatatgactaccctcgagacactagagcttattaacattacgggcatcattaaatggacctaggcacaatttgcaatggttcaggagtaacgggtgttcatcatcaacgctcatgtagggacatgaattccgaatttggtattttatagcaagttgaaatagttgtggtgcaatcagcaacgtctcactcctttgcagttattcttatcgggaaatttcatgaattcaggcttgaattgacggatttcgctattaatagcatgtgttgttaggaaaattgacatatttggacactatcaataatgctgatgcttgagacgtttgtttttgacatagttaacggcttacagcaatcgttgtagtttaccgatgtagtcgaagtaccacgtgtgaagtatatagttctgcggttgaaaagtatatcaactagtaacgatccgcctaggctatcgatactacactctgtggaatagaaaaaggtactgtgctagagattatgttctgaataattcctgatggtgaagtggcaaaagtcgtagttatatatcacgcggtcaagtggataagccccgtacggagtgccaactttacatttccgactttctttgtccgaggaaaagaaacagttcaaatcttcacaagcttattttaactatacaccaattaatagcctcattatcttgaagcttgctctaaagccaaggccaatgtgataagttctctctgactttgaaaccgaggacgggatgcagtctgattttcaaaaccaacggtccagtcggaattgtcgagtcctttggagagctgaagaagtgacccactactgcctgtacgagaagatgacgtctaccatttgaggggaagttattccacctgggtaatagttccagtccccagttcattgcagaaaatacgcatagcattgcatatcattgcataggatttgtgtttggatgtatcggaagcgcaacagtttgtcccccggcgccgtggagcccgaacatgtcagagatcagaagcgatcagaatccagctaaggtatcagcggtatgatcaacctttagctccacatgcctgaccacctgggcaggcttgacccctcagttttcccagcgtccggtccagccggtgggcagtgataggcgtcctatcaccacctgtagaccagtggattaggatacggcggcatacagggttctctgtcccggagcctatgaaaggatcaacctgtgtatgctaggtacggtacggaatgactcggatcccgaagtacctgaggcctgtcaaagcgcgtagaagggcactttactgtaggatctcatcactttcacatacccacgtgatagtaagacaaagccggtatgagacacggtttccagggactcaagttcgagataccttgcgatattggccaggtggtttatgcctgtatcgggtactaacaatggctggattccatttgccaagaagacccttgcgaatagacattcaagatcctgcattctcgattgatgacaatgtggattcgagaaagagatatcaagttaaagaccctttgagacccttccctagctaatgtcttaaggtctcgagtaaaaagggcatataaatcgaaaactgcaaaatcaagtagaagacccgcaaggactgaccagacctatttttttcccctattgtttttgttaggcttccttttcctttcctagtttctttttatattaagatatatacacatattgtatatttgtatatttattctgatcgcattcgcttttgttctcatatcgtatttagaggcgttggttggccccatcgatcttcgtttccaccattcccgggtcgaatcgcccacacaggtcattcccatccctgtcgagaacggcctgattccttcccacatctcccccccccccccccccacnnnnnnnnnnnnnnnnnnnnnnnnnnnnnnnnnnnnnnnnnnnnnnnnnnnnnnnnnnnnnnnnnnnnnnnnnnnnnnnnnnnnnnnnnnnnnnnnnnnnnnnnnnnnnnnnnnnncccccccccccccccccccaacccaatccatccactctctccctctatcccctcgactcgctcaaggggttagagatttctctaactagtcatgcacaagatatccaacttcacgggccaagcccgtcatggttgggaacgaatgacgccgactttcgggatgtccagacctcacaccgatatggcttttcgccgaccacacggtgcgccgcccatgacaccgccgaccagcatcgatcccacagtcaatctgtccttcaacgttccgttctcgtccacactagccggccccgatgtcgaagatgtgctccacgccagccccggtgccctccagcgctggactttcccggaaggcacactggagggcacatcggtgcatcagcttcccgtccacacaaataatgtcgaaggcttgcagagattatgtcggaagatcacggaagagaaaggaggacgggtggaagctacactcacaacctccgaggccaaggctgtgccctcgctacaacgccggccgaatggcttggtgaccaacgtctgtgtcacaggagatggagatatggcacgcaagatgcgggcgagaatcttgaatgagaccccgatcatgctggtacgtgaacgaatttttttggttccggcgccagcagtattttcatgtccacggacatcccttgctaacatcggaccgttcgctagcgatgtgccactgtcgatgtggatatgcatctgattatagatggatcgccaaagggaatcagagctagcgtccttgagcacctggacactttagccgcctacaccggagccgatattttcctactgactcccaaactccatgatgcggatagtgcggtagtttcgtcatatggctatgcgtcggataatggcttggaacagcgcttcagggttgccatttacggtgatttggagagctcggaacatgccaaaacccgggttctgatcatgattgaccaaatagtacgtctttgtgtgtgcgtcgtgaggcaggcgaactgaccagaaaccagctcaaacgccacgtggatgccatcaaactggactcgactatgcacaccttggtctgtggtcgcactcgcaagaacatcaagctcatcgaggctgctacaggcaccgccatttacttccctccacctttcccgcaaattttcggctacataccccccggtgcgaatcgtcgaagcgaggatgaggtttacattacaggtgagacgcccgaacagattgctcgcgccaagcagaagctgcgagaactagtgatgggagtcaagatttttgtcaaggatgtggttgtcagctcaagcaaaatcgacaatatcttactcgatcgtctggataaggtccggaaggtgatggaaatgaacggctcttatgttcttttcccgcagcttggtagccaacgcgggcttgttcggattcaaggaaccgaggtgttgcacgttgagcggacagttcgggaaatcatggctctggtgcgtcgctttgtggtttttggtggaatgatttgctaatatttggatgtacaggctggtcaattctatagtgcctcgtggtggattatcatgcccgaccccgcccaaggtggtctccgtgctccctcaactgccgatattcgctccatgctatcggatatctgtaccaattcggaagcggaggttagctttgacaatctgactttcacaatcaacggttccgatgatgcagtcaaggctgctatgtcagtcatcaaccagatcccattcgtgatgcgaagtcaataccagatgagggtgaagatcgagttagccaacgagcacaaggagtttgttagtggcaagaagaacggaaagatcaacaagatcatgggtcagagtgagtctcaccggacatctacctgtaacacgagatactgattggcacccaggcaatgtccagatcatcttcgatgggttcaacgagtacaacttctatatcgatgtgtgcggcaaccagtatgaatcgaccaagaatggcttggacttggttgagcaggagatgcctgcatcgatctcgttccacgtgcctgaccaatatcacaagcggatcatcggaattggtggacagcatatccagcgtatcatgaagaagtactctgtcttcgtgaagttctccaatgcaatggaccgcggtggcatgggcaaggaggatgacgacatcaaggttgacaacgtgatctgtcggacccctgctcgcaacgctcagagtctggaccttgtcaagcaggagattatggacatggtcgagaaagttgtaagtgcttacagtggccaaagctttgatctcatgatggaaacttacgatttgcaggatgccgaatacgtcgccgagagagtcgtcatcaatcgcttataccatcgtgagctattggcacgtatgcctgagattgaagagctggagaagaaatggaactgcaagatcgagttcccaagcactgagcttgccagtgacgttgtcactatctccggccctgagtatcaggtcccccaagcggtcgacgcattgcttggcatggtgcctgagagccatgagcttcacttccagagctcggctgaactccaggaatactttaagtgctccgatttcctcgccgatgttcggaccaagctcaaggagcagtacgaggtcgatatcaacgtggatgtcggtaccgatcttcctactactcaggaggaaggctcctcgtctcccacccccgggcctgaagaccgtgtggtcctcggatacacgcgcaacaacgccggtggcctaaaggacgccattgacttcttgatctcccgtcttgttgcacatggactggacgcaaacaccgtcaagggagctatcccgcgccccaagtccgactcgttcgaagagtcgctgcccttcttcgactcaaaactcctgcagcacgcaccagtgcccctctcgaccgactcgcccactcggccgaacttctccgatgagagcagcgaacgaggctcgattttcgagcgcctccgcaagcccggaagcatctcgtccttctcctcgttcatcggccgcaagaatcactccgcctcaccggggtcgttcttcaaacacgcctcgagcaacgcctccaaggcctcactcgtatccatggagtcacgcgatagcggctaccgcaacccatggaacgattctggcgtgaacctccccgaagacgacgtgcacgtcctggggagctcgcacagccacaagagcagtaatagcaatggctggcccacacgcttcgacaccaagtttcccttcggcaccgcgccgggtgacatgacgccaaagcatgacccgcgtacttcttatgatagtggtcgtcctagcacttccaattctacttctggatacccggccccaattgggccaccgcgttaaaacaaaaatatccatttgcagcagtatacccttttttttggttgagttgtttttgtctgtctttttctgcaattattttcattcccagcgtgttttttccggttctctttttgttggtcttcttgttgattgataccacggaacgcaagcaatgaaggcgtcagaaaagaaagagatatccaagatctgcgtgcgatagagcagggagaatggtcttgaccatatcctgcctctttttgtcttttttttttcttttttttttttcgcgatgcgcattcggaggaaatgacgggactggatagtctgaatttgatgataccagggccatctggcctcgacttcagaggagttttccgacaagttggggttttatgttgatgttttactcttttgatatcccccaatcatcaatgagattttgccattagaagacattctccaatctaagttgttatgatggaagctgctatacttgatgttctatcatcacatatagatgtaagtacctgaattcttcaatatgcttctcatagatagcttcgagtgacatcgatacctcggtatgcccccgtggcgagtgacgttatacgcggggtcgaagtcaaagcacctctccacacccccaatcatcaagttacaactcccaagagaccatacaatcctattgaaacacacagctaaacacctagaacacctaaaatgacagcatcctaccctcgcccggacttccaacgcacttctctaaactggaacaccctaaatggtccctggaccttcaccttcgacgacaaagacgaaggcctaatctcacaatggcaaaagaccagcctggaaggaataccttcccaccagataacagttccatacgccttccaaaccccagcctcgggggtaaacctcatcgaagcgcacgaggtaatgtggtacgagcggcgcatcatagacatccgcacagccaatgaaaagcaaaaaggcaatagactactcctccgcttcggcgctgtcgattatgagtgctctgtctgggtggacggcgtcctcgtcggcggacaccgtggcggtcatgtgccattcgatatagatatctcggacgtcatcgccgacggcgctacagaagcccgtctcactctccgggctagagactcgccttatgacatgacccagccgcgtggcaagcagttctggggccctgttccggaaagtatcttctacacgcctaccggcggcatctggcaatctgtttggttggagagcgtcccggctatgcggctgctatgtgggagtggagggacggtgattcgttctgatgatattgagggcgggaagttacatgcaaaggttcaagttgccggacgccgcgttggaagtgcggcgaaggtcgaggttgaggtttcacttggggggctaggtattgcaaaggtgcacggcgagctgccgcgggataaaaccttcgttgcgcttgatttgagtatgacggttactgaagctgtggtggcacagctgaagacgaagaatcagaagctgttcggtgttgatggagtctggagtcggggtgtcgcgctctgggctccggagcatcctgttctctatgatattacgcttcgcctgtttgatggggccgggggtcttgtcgatgaagtccagactacgaccggcatgcgcagtctaaactggcaaaatggcgatggaacgttccagctgaatgggaagccgtatttccagatgttattcctggaccagggctactggcccgaaacgggcttgacacctccgtcttcagaggccttgaagacggacatcgagctagcgcagaaactaggcttcaatggatgccgcaagcaccagaaagtcgaagatccgcgcttctactactgggcggaccggatgggcttcctcgtctggggcgagatggcaaatgcctacgagttcgacactgactacgttgagcggtttaccagcgagtggatcgaagccgtgaagagggatatcaaccacccatcgctgatcacctggacaccacttaatgagtcgtggggtgtatccgatttgaaacacaatgtcgagcagcgcaaccacgttcgcgctctgtatttcatgaccaagtatggcccacccgatttagagaaaatggatgaactagctaatacaaaaaaacagagtcctcgatcctagcagaccaatcaacgacaactgcggctgggaacacgtccaaacagacctaacaaccttccacgactacggcgactcaaccgacctaggcgccgcatgcgccaccatgacagcgatcctcgagctgaaaggtggacatgaggtcttcaccaaaccaatatccttatacgccggctctctgatcgtcgacaaaggcgctcagcatacgcccggcgcaccggtgatctgctctgaattcggcggtgttaacatcgcaccacctaaggactctcctgccgccggggagcgggactgggggtatacgactgcgaccgacccggcagacttcttggtgcgatttaagaagctggttatggcagttgtgcaaccggggcatatttgtgggcttgtctggacccagctgtatgttgcattcgtcgttcctggcctttggatttgggacctgggaatttgtgctaacatatttccttttacttcgatctaggtgtgatgtcgagcaggaggtgaatggcctgtacaccttcgatcgcgaggagaaggttcccgcagagaaggtgaaggagattatggatgctgcgaaggatcactactaccgtcataccacttctcactcgaaggggtttaggaagctactggatcagactaagcattttgtgaatctttaggtcgtgcaatgctcattgtggatttgagggatatccagtgagcggcatcgtacctcttaagaccgtagttatcagcaagaggccatcatgttgaagctatctgaagatcagagatatattataggttcatgcggtgtcgggctacctagttccaccctaaattcttcgtataattgatgaatgaacaaaagaacatctaaaagtgatttaaaatacaaattgcccatgtagtgatgtgatcggatgatctctaagaattgcggccagcagtggatatacccgaagtgtcgctggataaaaagtgccacagaaaatactataacggatatgacgttgatccaattctatattgaagggtgaagatatagcgctttgtcgatacccaagcactcgatatattctggaacgcaggacactgtgagacctagtcaagataagtccgcgatgcaagatttaaaaaacaaaaggcccgaaaatactattgaacatcaccaaaatatatattattgtcactgggcgctagacgaaaagatcccattaagtaaagactgaagagcaaaatagcccaaagatcaattcgctggatgctgtactcgaaaaaaaaaacaaccaaaccccatagaaacgccggagatgccaagaccccatatcaggcgagataaagaaacgtgctagatggatgtgaatgcgggatgcagaatgaatgcatattacaagtaaaaaatttacatgttagccaattcctggtcgatctgtcggtccaggaaggctcgcttgtcgcccgtgagcgaggtttgcaggcggtgttcgacaagaacgcggactgttgggtcatggttagcgaactgtatgattatcatagaaattaaggtaggaacttaccctgttttttggtgacagtgtctagatcaacctcggccaaacagccgcggattgcctcggtgatagcaccctcatcgggcccactggcagaacggaaatcaaaggcggtgctggcgggtcgagaggggtactggggcagggggctgcgcgagccagcattgccgaggaggttctcgctactctgcatcatgccgacgctgtgtctgctcgaggccatcgggttgtcttggtaggcactgaggccacccatggacatgtgccgagaagcctgggcagagtggccgcccatgcgagggctcatctgcggcagatcagtgtagcgggagaagttcgacatgtgcgagttgcggtttccggggacgttgccgccgacgaagggtgcgggagactgtgggggcatgtaggggtggttgcggccctggcctgggaacccggtgagaatggtggaggctggcttgacggatgagtactgcgagtgcatgtcatccatctccatagccatttcgtcataccggccggtggcgtagaccttctcctggctggcactgacctcgccgcggcggccggggaggttattggccatggcgtagtcatcccagcgctggagagggatgctgcgtggatcgaagggctcatcttccacggcgatgacacgcttgtcgcccttctcgccgatgacaatacgggtggtaccccatgtgaaatcgtcctgtttccagaaggcatacaacggcaagacgaaattgtagatcgggtacgcaagaaggtagatgatcatccatccgatgtgttgccactgccgtttgacaatgaagatgatcgcttgcagaccatatacaccagccagcatgataatcgagatcatagggaagggacccgtgttgctggcaactcggtagatcaggtaggtgaggtacacgcaggtcgcaggaagaatgagagttcccaccagatcgacgagaacgacgaaacgcatactgaaacagcagaaaccgcagagatcttccagagctgccagttccaccaggttgtggattgtggagttgatccaacgacgtctctgcgacataaggacactccaggtatcgggggcggctgtgctcgcgtaggcatctggaataaacttgtacgacatggctgggaagtgcttggtcatgatggttgttaggtaccgatcctcgccaagagataagaggttcttcttgtggagggtgtcaacatcattgtcagcgtaatcgtgaatgactttgtccgagataataagaggacgtcctttgtccgcagttcgaaggcggtacatggtgaaactaggtattgttagtatcacttatttccgagaaagcatataggaacgtaccatccaggaagacaagtaacactgccgaagagcgactcaaatgccttggccaggtgatgcgagatatagtattcgtaaacctgaatcatggtccaccaactacgttcctcgttctgaagactagtctcgccgcaaatgccagcgatcttggcatctgctgcacatgctgcgaccaagcgattcagagaatcctccttgacggtggtatctgcgtcgaccatgagacagtattcatatagctcgggatccacaccgatgacgttgttgatttggtggaacatttccagttcaaggggggacataggtgagcgatggtgaacacggttcaagaactgcatgagaaggacctgcgtgtctcgcttgccacgattgccgggtttggacttgcgctgctcggattccttgccaaccttgacgaccacaatgtagggcacgacattgccttcgtactcatagagtccagagtaaaccttgccgtagttcagctgctcacttccctgaccgagagatttgcatggcagtgccggtgggtccatcttaggatcaaccccgagaatgtccagaacgatctttggggtggggcggtcatttccgccaccaacaatcataccatcacagatgacaaagatcagctttctcttgttgtcgtactgcaaggcagtcagagaatcaagacctttcctcagatcgttctcgccctcagtgtatgcggggaccatgcagatgacaaatttgtcctgaggcgtgggccgacgtttggaccccagctgcagagctgccaggaatttgaccagaatgacagcgcagataagaatggtaaaggtgagcaggatccaattattgacagtgcatcgtgcactttcacggaaatcaactttgccgacatagaagacaaagtcgagacatgtctgagcatttttgaaatctgtcgtgtcctcccatttgtcagtgacgtcttcgcccatgttgtccttgaagagagcagtcagagtcgagggtagccaatcgtatgtgtcgagattgttcatcgtgctcagtgtatagaagtaatctgtcaagtcatacaccttttgatccttgataacccagtagcgagaatcagcgtcggcctgcttcttgatggtatcccttgtccaaaccaggtcacccttgtagtatgtaccaatctttggcaagaatttcttttcataccaggtagacttgtggagtgctgaggtggtgcttgttgcttgtgcccccgatttgtgctcggccgtagaaagggcgatggcggatgtgtcgttgtgctgcaaagcgagtgtatcggatgtaacaaatgaggaacaataacgattgaggggagggggaaagtaggcatctaaaatctctcctccaaattgttccatgttcgtcgaggatgttgtttctccagtaatgtcactgtgttgtgtgcgccagaacttgctgatgtcgtagacacggccgtggatgccgacgtaaaagttattgtcagttgtgtgccagctgacttccttcttattccagactttgtccttgttgggacagagaaggtcaccaaacgcaatgatatagaagcaaacaattgcattgaaaagcagaatcaaaaacacaaggacgagcttttctcgccaggccaggcggacatccgggcgtttcatgcggccaatgtatcggagcacgaaggaaggaatccagaaagtcagcgcccagacaaaaccagtccagagccggcggcccaaggtgatggtcttcttctcgatgtgctttggatcaccaaactcagggtcgaattcgccgacgtaccggccatactcgtcgtagtacgcaatgtctccttttttgtcgtcacctttccggcccaaaccgtagtcaccggtattaacagcgttggcgaatggcgcactgggggcgatggacttggcaccgtcaatcacactgggggcgatggcgccgctaggtggcatgctaagaagattggaattctcatggatgggagtgccatctggggtgaaggcggtctcatacaacgcagggccgtacatgaatggattcacctgagtttcctctggcttgagatccagcatactttccgcttcccaccatgccccctcgcgcatccatacgcgctgttcaccgacgacggcgtcgccgttgctccagcctctctcaatgatccagttctcaacaccgtcctggccttcggtgcaaccaagtcgcgcatatcgactgacaaactcttccacgtcgaaatcggcggtgaaatcgagttgcttcaaacgacgattggcccattccggcagtcgccagtcccgcagttggcgggagactgcaccagcagaccacgctgtaggtcccaatgacacgagctgctccggcatatcatcagtcggatggatggagaggtggtaccagacacggctgctgttgagcgtgttggcaagatcgaatcggccacgctttcccacggagataccttcggtatcattggggaacagaacgcgtctgagaaaagcgtcaatctcaagttcaacaccaaccttttccaataccccctgccgcttgtcgagatcatgttcgcgttcccgcccggcaaggcctgtcatgatattgagatctggttcgacttgagctactgcagagttcatttcactgatgatggaagctccaataggcggaaggggaattccatcgtccttcatttcagcattgagaccaagagcatcatcgaagatgcctctcatcatgatcgctttaccgagagccggtcgtggaatatcgattacagtcaggttgactgtatcgtccgttgaccattgtgctgcaccacccccgttgctagaatcgttttccaatgcaatctgaatgtcggctgcgatagcttcatttgctttgctgatgacccaatcgaccagagcttcgtagagtccggcgatcaaaacctctcgctcatcagtggaacatttatgaagaaggatttctggatcaattcccaggagacctccagcatcctcacagacctcttccaggtcttcttggtccacctcgaacccgactgcgttgccgagcttaagaagaccagcaagggccgatagcaagcctcgctgggcagcacctttgataccaatggatttcaaagaagcacggaagtcttctgcagcggcagcatcatcggctgtgggtagatagtgtggaggattatatgtgtttgatcggttgagcaaggtatattcggcggggtctttcaagtccaaaaattcccgctccgcagctgtcgatgtcgatgttaggagataatagaaggcatcaaatgcacggtagccggtctcgggctggatgtctaaaagacccttgcgcacattgataccggaagtggacaaggcgaaggagaggccgacgacagatccttgcaaagataagttgaaagtggcggccaatgccgaatggagagaataggaggggttgaacgaggtgactgcagtaaggaaaggtcgtatagcggatagggcgatcagagctacctcgggtgtttccactgggatcgctgcgatgaagggttcgagcaacgagggcgtggattgatggagggcgctattcgatattagcacgtatggtcttcggatcgatgcagtgttaaacataccctagaacaacggagccatcctcagctcggcgtcgagcatgttcccaagctctgatagccagatcacggtcgacggtggcacccgttcgcccatcgggtaaagtggttgctgcggtcacccatgtatttacaaccaaactcgtggcggagtctagttgatatggttgccccgcggtataaaacgaatggagggcattcagtaacgttgttgttgagacctgagctccatgttggggtctgggtccgactgagagacctgtcgactgcgtggagaagaccgaataacggttcgacatgacgaatgtgaggtcggagggtcaacaatgttgaccgcaagatgcgatgtccggcctgttcgttatcaaaatcgcatgagggtactcttttttttgtgttggtcgtttgtctcgctaaatgtacaagagtggacgtgtagaggttgtaagagagttggatttagggtaggtcagggttgcacgatccaggaattggataattgagcgagtgactggagacggaactcctgaatgagtgagaaagaagacaaaacaaccgagaagatggcgtggggagaaagaaacccatggagtttgaaaattacggggtatggaaaaataccgtcgatcctgacgatcgtctcgaccctgtccaatctggcagttaagcttttgacatttcgtccaatgttctccctgaacagtcaaaacacacgcaattcaagtttctggttgatttgcaatgttcacatggcccaggttggattggaacctggtatctgacagtttcccccctgtaattttgaaaccataacatgtttgttgctctttcaccctaacgggtccctgatgggtccctgatggcttctgcttgataagttccgaccaatcagaagccacccgagcagacagcgaccctgggacccagaactccgtcgatggcgtattgtcatttgcgtacggctgtatgtatttaattgtattaatagtacctgaccttcgtatggcacatgtggctgctatatttgggatgtctcacacttaactccgtacagatgaccagtttcgccacacaatggacggagtatgatcggagacttgatatccactgtgctacctgtcctagcctggctactggtctattcgcgagaatgtcgaaccactctatcttttctcttctctagtgatgtattttctagaaccccctagttgccctagtttcagtctctatccattgtcttttgcctcttttcacggtttttgatatgcaggtctattgcaagggggttgatcttggcaaagaatatggggagttgacgtgttccagggacctggaccctgtacggaccaaactaagtgctatctacaagatacgtactccgtagtacaacctgtatgtactccgtagctctgtaacagctggagtggagatcgctagatattaaaaagatccaaaactggttctgcttcacgtattgttttgtttttgtttttgttttgtttttctctctcgctaagctatattgcagtatctctagctcttatatcatgtctcattctgtaatattgtgggaacactatcagctatggtggattccacccgagacacgtccaatgaagccgaaccgaattaaatatcggaccatccctaaatagccccccagttgatcggtatggccgaggtttacctattcttagcgaccgagctagtaatttgtgttgtatgccgtattgcacaataccgcatccacccccgacctcttatcgatttgttgctttttttccctttgtgatcttccattctgggcttctggcttctggtttctgtttctgttcctgcttctgcttcaatttttgtctctcagccgcttgtcatcctatacgcttcccattgcacctcaaattataacctagtcgaatcttcctccctaggcaccccgatgtgtacgatctcggtctgttgctaggggtctttattccgccaagtccacaaggcattccgattcgcctcgctccacgttcattccgtcactggagacttcttaagccactcgctctgtgaatatttgacgtcccaattgcccttcgcacactcgttcacgccctcggatctcatcccgaggagactcaaatatggccaacgcctattctgggagtggcccggcacacgctcagccctcactcccctcattaccagcccacctacagtctgatacacatctcacggcccatctcgccagtcggtatgaagatccgaccctgttcattacaacctcggcatagctaacgtgtgtttcaggtttcatgtgggattacctactgcccacctgtcatcccaggccctaatttctctgaatacatattcatcggcgattaaaggacccgatggcgggaaagagggaagtgctgccggcgaggctgaagatctcgcgcgccgtgccttcactcgtctcggtgcgcgtggtgagaaccaagccgttgtattcttgtaagctgaatccactctctgcatagaaacatatctaacagtcattcaagaggagagagcggatccggaaaaaccaccattcgctcgcacttattgtcttcgtttttatccttctcatcgaccccgctctcctctaaaatctcatatgccgcctttgtattcgacactctaacaaccaccaaatctgtcactacacccaccgcctcaaaagctggtctcttccttgagcttcaatacgatgcatcatcctccgtgaaccccaccttgattggtggtaagatcattgaccaccgattggagcgaagccgcatctcctccgtgcccacgggagagcgaagcttccacgtgctgtactatttgctagcaggaacaagtgcggcagagaaggcacacttgggatttgagaatagcatccatgttcaaactggtaacaggctgtccggatcacatgttagccacaagcgctggcgctatctcggtcatccaactcagctcaaggtcggaattaatgatacggagggcttccaacacttcaaaaccgcgctgcggaagttggaattttccagaggggaaatcgccgagatctgccagatcctggccagtatccttcacattggacagctcgaattcgccacgggtcagtctaccaccacaggtgcggaagaaagtggcggctattctcacgagggtggtgagactgttacggtggtgaagaacaaggatgtcctcgacaatgtcgctgcattcttgggtctcagtgtcgatactctggaaaatagccttggttaccggacgaagacgatccaccgcgagcgcgtgacggttatgctggacccgaagggagcgcgagagaatgctgacgcattcgcacgtactatctattctctcttagtgacctacgtcattgaggccgtgaaccaaaggctctgtgcagctgaggacagtgttgccaacaccatttctatcgttgatttccccggttttgctcaagccccctccacagggtctaccctagatcagcttctcagcaatgccgcaactgaatcgctttacaactactgccttcagtcgttcttcgaccacaaagcagatatcctggaccgtgaggaaatcacagtagccgcgacaagctatttcgataacacggacaccgtgcgtggtctgctgaagcatggcaacggtctgttgagtatcctagatgatcaaacccggcgtggaagatctgatgcacagttccttgaaagcgtgcgaaagcgcttcgagaacaagaaccccgccatctcggtaggtggcaccagcggatcaggtgcctatatgtcccagacccgcagtgcgttcaccgtcaagcatttcgccggcgaggtggattattccaccatcggcctgcttgaggagaatggagaagtaatctcgggagatttgatgaacgtgatgcgctccacccggagtgactttgtgcgtgaattgttccaccaggaagctctgcagaccatatcccacccgcaagaaaagactgccatcatgcaggctcaggtgagctctaaaccactgcggatgcctagcatggctagacgcaagaccggaccaccctcccgtttcgctgccccaagcgctcaccccgaaagtgaggaaggcgatgaccaagaaagccaagttgcaggatccaagcgagccagcggtcggaagagcggaatgcctggaccgactcaaggagccgccggtcaattccttgctggtctggagatcatgaacaaatgcttgagctcctcgaacctcaatccctacttcgtcatctgtctcaagcccaatgatcgtcgcattgccaaccaattcgacagcaagtgtgtgcggatgcaggtccaaacattcggtatcgctgaaatcagctcccgtctgcggaacgccgattacagtgtcttccttccgttcggagagttccttggcctcgctgacatcgggaacattgtggtcggcagcgatcgtgaaaagtccgaggttgttctcgacgaaaaacgatggcctggtaacgaagctcgtgtcggtagcaccggcgttttcttgagcgaacgatgctgggcagatatcgccaaagtgggcgagcgcgtggtaccatcctatgcaaatgccggtgctgatgaagtcgatggcttccaggccgccggtggaaacccagactccaaactccgacttcttcacgccaccgaccagtctccgggtacttttatttatggagatgatcccaaacaaggctatttcggtagccgcgaactggatggacgctctgatgccggaggttccgccttcaattccggtgatatgttcaaaaatcttgacacgaaagagcaaatgctcgagaaaaacaacgaaaaacagatggaggaagtcgacgaggctccgacctccccgggtcgtcgccgttggatgttcctagtctacctcctcacgttcctgatccctgatttcgcgatccggttcattgggcgaatgaagcgcaaagacgtgcgaattgcctggcgtgaaaaacttgctatcaacatgatcatttggttcgcctgtggtgtagcagttttcatgattgtcggtttccctggagtggtttgtccaactcagaatatttacaacacggcagagctcagcggtaagaatggcgcgggtacagctgactcttatattgccatccgaggcgtggttttcaaccttggaagtttcatgccatcccacttcccttcgatcgttccccagaagtcactcaagacctacgcaggcaccgacgctaccaatcttttccccgttcaagtctcggctttgtgccagggtgttaatgggaaagtggatcccagcgtaccattggactatcgatcaaacttgaatgattccgcagccacgacatccagctccacctttgatatcaatgccaagtaccacgatttccgctactggactactgacccccgagctgattggttctacgagcaaatgcttatgatgcgctcgaattacaagaaaggctacgttggttatacggcaaaggcaatgaagaagctggccaccgacgattcgaagaatgtagtaagtatacacgggaaagtctatgacatgacatattacattgccgggccccgagtacctcgccggccagcggggaagaacgccactggcagtgttgataccgattacatgagccctctgcttgtcaatctcttccaggaaaagcccggagaagatgtaagcaagtattgggatgacttggatttcgacacggctctcaagtcgcggatgcaactttgccttgacaacctgtttttcattggcaaagtcgacactcgagactcagttcgttgtcagtttgcgcgatacttcattctcgcaatttcgatcatgcttgtcaccattattggcttcaagttcgtagctgcgttgcaattcacaaggaagaaccttccggagaatttggacaagtttatcatttgccaagtcccggtctacaccgaagacgaagattcattgcgtcgtgctatggactccatggctcgcatgcgctatgacgacaagcgcaagctactgctcgttatctgtgatggtatgattattggccaaggcaacgatcgtccgactccccgcatcgtcctggacattttgggtgtccccgaatccgtggatcctgaaccgctcagcttcgagagtctaggcgagggcatgaaacagcataacatggcaaagctctattctggcctgtacgaagtccagggtcacatcgttcctttcctggtcgttgtgaaggttggaaagccttctgaagtgtcccgtcctggtaaccgcggaaagcgtgattcccagatggttcttatgcgcttcctcaaccgtgttcactacaacctgcccatgagccccatggagcttgaaatgcaccatcacatccggaacattattggcgtcaacccgcaattttacgagtacattctacaggtcgatgctgataccatggtggcgcccgatgccgccacccggttcgtgtcggcattcctttccgatacgcgtctcatcggctgctgtggagagacgtctttgtctaacgccaagacctccatcgtgacgatgatccaagtttatgaatactacatctctcacaatctgacgaaggcattcgaaagtttgtttggatccgtcacttgcttgcccggttgtttcactatgtatcgtatccgcacagcggagaatggaacgcctctctttgttagtaaggctgtcgtcgaggcctactcggagattcgcgtcgataccctccacatgaagaatctgctgcaccttggtgaagatcgttacttgacgacactgcttatcaaatatcacccgaagttcaagacaaagtacatcttccgatgccatgcctggacagttgcaccggaaagctttactgtcttcctttcccagcgtcgccgatggatcaattctacggttcacaacttgatggagttgattccgctgtcacagctgtgtggtttctgctgtttcagtatgcgattcattgtgctcatcgatctgctcatgaccgtcatccagccagtcacagtcgcctatattgcttacctgatctattggtgtgtgagtgagcctagtgtgctgcccatcacatcattcattctcctcggtgttatctacggtctccaggccttgatcttcctcgttcgacggaagtgggaaatgattggctggatgttgatctacctcatggccattcccattttctcctttgctctgccactgtactcattctggcacatggacgatttctcctggggtaatacgcgtgttatcaccggagagaaaggtcgcaaagttgtcatttccgacgaaggcaaattcgaccccgactccattcctaagaaaatctgggaagactaccaggctgagctgtgggaatcccagacgtcgcgcgacgatcggtctgaattctctgcacactcctacggcacccgactgcctcccttcccgcagtcagagtatgggtaccatactggctcgcgcccggtctcgcagctcgacttgccccttggagggggtggtactcgttactctgctgccccatctgaaatgatgagcagctatggcatggaagacctcagccatctacctcccgatgatgagattctcgaagagatccgcaagatcttggcgactgcagacttgatgaaggtctcgaagaagaccgtcaagcaggaacttgaaaggcggttcgatgtcaacttggatgccaagcggccgtacatcaattctggtaagtcatcattcaatcaatatcgtaatggacacagctaacagatatatagccaccgaagccgttctatcaggggttctttgaacgatctatctatttacaatattccttttttttttcgtcttttcaaggtgtggacatagttcttgtgacaaacatgtgttattaattatttctggctgtgtcttgatttttttctttttacaagcgaacttatgcatggatgagagctttgcgcagcgggtttcttgaccttgattctttttttgaaaatgtcgccattcgcctcataaactatttatctgtatccttgaaatcgataattcccagagcttacccctggtgtttggttttggtccatgtgaattcgtacatcgtaggttttatattaatatatactaacacacttttggtctcatgagaccacagatccgttgtactagagaagttgcggggtgatattattcggctgattagagtcatggtatggaggagactgcaaaacagcaagtgaagagacacttgagtgggcatatatgcagagctatgtctggactcccaaaccttcctaaaacctatgcggtggtgacacaaagggtaattgagaataggtgatgaagcagtaatgagcgatatgaaagaaatgtcatcagaaattattgtataactgcatccttttcgcttgcactgcactaatgtgcggctcaaacaaagtctgtgctaggtcaagtcgggaagtagcggccccactttgaccgataaccttggaaggtacatatcaagacgacaaaatggcgacctaggccgttcacagtacgaccaaaaaacgttgtcatcgcggtatacacctgtgtacatgaattcttataaagccccccatctctcacattctacttcttccctctttctctcttctctttcacacccttcgtaagttcaactaacaacaccccctctacctgcattggacaactactgacatttctttacatcaaacaggcccggtgtaatctacaggaaactgtgaattactgcgaggactacagcccggccgcttgttgggactttctatctaatcgaggcttggagcaatccaaccctcgattatgatcatccgattgcaacctttcccaaaacaatgcttcggcaatattgggtgcgggccaaaacatgtgggcctatacgttcttttggggttccatgatagcggcttggtgagtattgtagggctcgtgggcgtgggattacacatcactagaacccaacttgggagccagtatgtgtaaatggcctgtttgtacacgcttcagactcaatatctgtcgactttacgttatagcagagccgaagatcaattgcctagctaggtaagttctgtttctgcttgatggaggtggtttcaatattccttcggtcagtcatgttactggaatacatttctcaacattaatataatagatatattttagacttctgttctcagccaagcgtggccaccctttatctagatttgaatgaagacattatccctccactggctcaaccgtctttgccatcccaatcaatacttccagccattcagtctcctgtgttgtaaaggcctttgccgcagaatttgacaagcaacatagattgctctcctctagttgccacgccgcaggatctagattttcgctcggctcctccataaacatgtcaaatcttccaacccgtttactacccgcatatttattctcatacagccaaccattgaaccacacagggcgctgctcgcggtccaaatgaagaagctggggggcgcagatagtttggtctgactcgtggccaggcgccattttgcgtacttttttcactggaacaccctcaggccgttcattagtggcgttgacactgtcggggacttggactacgcccatgactccagatccgcccgggtggaaggcataggaagtatcaccagcgagctcccatccaatccaaaaagtttccttatcacctgtgcagctctaaggattagcaaataaaaaagggatttgagaaggtatgtagtgaggcgcaacgaaccgaagaccatatcataagtccctttaatgtccccgccattgccatccctatctggcccattcatcctgcatacaagcaacaatgcgacaaagtgcatccacttatccacaacaacgactcccgattcttgcatatgcccgctttcaccggtccacattctgctctgctgcacggattccgaaatcggcggcggcaagatcttctgcagccattccctcttgctctctggcatgatcttcctatctctgaagaaaagggcgcccgtgcgcaagtactccgggtcatcaaatagtaactcggggttaatgaagaatagcgagtcggcgtcaatgaacatgacttcgcggaaagacgagagaagcatagaaaagggcttcccggcccatccgttgagctgccaaccttcgtcattaaccattacagagaggtcacgcgttgtgacgcctgacagagcttcaagcttcgtgcggaaatcttcattcaaatccctgtcaccgaggtacattatctcgatggggagatcgcagcccaggaggcgaaaggaagggatggcagccagtaggtaaggcgcatggctattgcccgctgttgtcacgatgccgcggcctccatggcgcgacgagacgtgcaagctcatgtggtctgcaaagtacgggctcgtccacggaaacaacagtgtagcgaatttggtgacaaagtggcggtaagtttcgtatttttgcagcgcctcggggaatgttgactcgctgaacgtgtcgcgcatgtgggtgataatatcgtcccgcacgtaagtgtgatctctgttgttgacgaggtggacatcctcccaagcctcgaagaactttttatatgcgcgtgtgcgcaggccaagctcgtgcagcctcttctcccctgtgctggttactggctgtaggagctctcgtgtgtctgactcgctgggaatggttgacagaaggtagtcaagagcagcgctagagatgtcaagccctagattctctggatccgtctttttgtcggtgtgttcaacattatttgataatgattgcgttgagtcttggtctttccctgttgcggagtttacgttttcctgcgactctaatggaatttgtacagttgatttttcatccaacatgtcttgcgacgtcgaatcatgtacaggtgattccgcagtcctgataccagtaggccatagttgccaaagtctgcccgtgaccaagctagaagtcgatttcagactcttggggcttgaatctggctccctgaggagcagagatgatattatgaaccagccagcccctaccgcaaagatgaagcgaatgatccgaaaaagcatgcgttttggtcgtgtttttgctttgaacctcggatgtgacggaggaaagcggccttctttgggtggaattgcgtgctgtgggagcatgatgtggacaacagtggaagatgaggtatctattttcgctgattttacaaaaatatgaaaaggaaagacagaaataggtccgtggacaactctgaaacagaaaggacagcgcgttgcgttctatacccctttctagttagtgttgcccttacctccattactttgtaccaactttataaattctcgcccttctttgcatatgaataaatgcgaggctcttcactgggaattgtaagtacatatgtagtaacccctatcaaaaatggtttccctttgttgctgatgttcaaaggttgaatggtgtctcagtggacccttcgggtacaaaggaacctagaatgtgagacagtctcagcattcatagctaggtagtagctatagaggccatatgtcgcctcctgtaagtagtttattaactaactactaactaattactaactactatgtagttccggtatgtagtcctggtatgtagttctggtatgtagttatgtagggagcaatgtagggataatctccgtagtgtagttccgtcgaggtccttgattggtccgagacagatttccagtttgcaagccggcttcagttttgatctctcgttaggatattaggtggtggtgatattcggttatgctattcctcgctcttcgtataactaagtagaatcacgtgtggagccagttgtaacgagtccaacactttattctgaaacgcggacgaataaaggctcggaagtcattgactttcctgctaaatactacatctacctctagccctgcaggaggaagagcgatatctcgttcgctgctacttcgcttagattagcaatccgaagcggacctatacagaatttccgctcacctacgtggtattatagcacaccaaagacttgaaaaatctctttgagtgactcggctccagcgatacagttttgtccctaactctttatcaagtctactcctgttcaaactacaaaggatgataaaagaggcaaagaaaacgtgaagtctttatgactcgcattgtttcctctctgtcaatcttctttaaatttcactaatctggtttctatcgacggaaattgcataaatagactcgatcgcaccctcttctcgtcaagttcattcaaagcatcatcaaccgactaaccacagaatacagtcccctacctaggtttgtagacctattcagaatcatgccaatcttcacatggaacgccgagcatcagtttctgcacgtccgcgaccaatttatagctaaagtacagctcgagattgatgccattatgacccgcaatgagacttcgcccttccgcttagccctagcctatgacaacctcaccgaccttatttacgaggtacgtgttgttgaaaatgctagcgtcactatgtatagggagatgccacaatgccgtaccgtgcgcgatggacatggctattacgggtacaattccgagttcctgtggaagatccgccagcttcagggccatttagttgtacttaagaatagcctccacaatatatttgacgactggcattgtatttcgcgccaggtcggggctgtgggacagtgcttagacctttaggtatatgccaatttatttcatcgcaggagttttactcaaatgcgctagcgcttttcgtagtattgtagtcaatagtaactcgctcgtagactaagaagttgtttctggtgctcacagatatctcgagtcttcaagttctgctaaattcctaagctaaagactagtcatttattgctaaagctggttgccaatattctccacttagtcaaggggtgtgaataccaaaaataataatgctgtgttgaagccaacaatctgcactgcgctcttgacttcggtttgataacgactacccctagtatggaggagacccaaagtatttacagggtattgttttgagatacagtaacatatctattacgctaggctatttcaggttgtagttgcaatatcaaaagtctcttaaattcaaaactggacactaattaaacaatcactgattgtttttgattacgttgaatgtttccaagtacatcaatgaccaagagcatatcaggcaaatcgtccattggacgattcagcccactccgatcagagaggtaatggaagtttgttctatggctcttctgggtatatcgatttgaaagtatcttcttcaaaccctgtacccatgcaacataccaatagccctcttttccttgattaaatcaaaatcccactgcccacagcaaggagcccgaaggccaaacaaggatatcgcaaagcttgaagctccaacttgtttcttcgcttcttcgaaaaaaagcggggttgcatggccagttgcaagcggtatcacacagtttcctgcgtaatcccaaaaactccgctgaatgcactagacagaaataaccccaagttagtagcgaaaacaaacagactgaataaggggactcacctggagtttagccgacccgccagaactgggattgtgcactcccgtctgacttcaggtcttcccctaaaggttctgatgaaagaagagcgcaggtaagagatgatgacaaccacagactcgtaagactggtaagacttaccttggacttgtgtcccagatgccccgcaagacgaaatggcagcatgtatcactacgtgcataccgacttcgcctcaggcttccaaacccgtagggattgatggtactggcgaattatcccatctgcctccccaaggttcacagcacggatcctccaaaagagggtgccgacttggtccgggcgtttttgacaattattctaatggaaggagactgtggttagaaatggtaaaaggccactggctggagaactcacccgcacatcaccaaggctgacagaacaatcaatgagagtccaagctcaatgcaggtactttgctgccataacgaaggttctaagaaataacaagtcagtgaaacgaaaacgattgtcagtagtggaggaattcaccccacatcaccaaggctgacaggacaagagtccacgcttagtacaggtacattccgtcatccaacgaaggttctgagagataacaagtcagtgatggggaaaaaattgtcaccagcagagtagagggactcaccccacatcaccaaggctgataggacaagagtccacgcttagtacaggtacattccgtcatccaacgaaggttctaagaggtgataagtcagtgatggggaaaatattgtcacgggtggagaacatacaaccgctaccgaggcttggggccctggcttaggttttccgacgaaggcactaagaggcgcgagtcagttataaaaaaaagtatgtccaatctgcaagtgggacaacataccatgccggttcgatatttacaggagaccctgcagtgtcccccgtaaatctctaaaggctgttgaatgttagcagctcatcttgaccgaggaggaggtatgaggctcacctgtaccactcccatgaaagctgtgccagattgggtccgggaagcttgcaagggaggaggttgaaaggaggaagtttgaaagaccctggggggactttatatagcagacctgacctgtgcaacttgctctggcctacttaggaagtgatagccccactttttatgttcgcgaacaaagaacaaaggaaataagaaagtactactaagcctaattggggtgggaggtcgctaggtggctgggagtatgtaaaaaaaacatttaccaccttccatactatagcttgaactacagagtacaaaaaaaacatttcaatcaactaggactctaggggtcctagcagcttaccagaatgtaggtggatatcgtagggactgaaataatagctgttcgatcattaatgagacatgtctccttcaactctatgcaccactccttatgctgaccggtgaaaataacccaggctagtagagttactacgcctgtttatttctccatggtattcataatgtaatgccccaatacacgactctatcaatgtgaaaaatatccaaggtcgggacccgtcttcaccgcgtctctctgagcaggtccatagtgacgtacgatattttgcacttataatctggagcttcctcgccgtctggaccaagctgtcttttttcttacgaatacgatagttccttgagtgaacatgatccagaacggacaatatatatttgactgatgaaacctcaaatagggataaatattccacgaacaagtcagatatatgccctcttcacatgttaagtataactaagtgactggaacttgcggtctttacaaagcgagagcgatcgcgatcagataccctgatcggcacatctccatcattatccagggcggggggaacggatgccagagatgacatgtgccaagtggggctgtcaatcttttgtctactccgtacagatgtcttatatcagtaaccgtacgtccaaacccccagcgaaagctacatagagatccgagcgagttatctgggatcatctctccaaagattataatctacaaatccatcagcaaactccaaaccaaataaacagccaaccatggataaccccaccccgcaaccgaacccaaacccaaatccaaccgcagacccagaaaacccaacagccgaccaacaacaaaaagaagctctggcagcctttaccgcaacactccactcagtcggaacaaatctcgaagcgccactccgcgaccgcgcagcaaatatccaatcgaacgcggtggttctggaaagacaagaagccgagctagcagagaatacgcagcgactagcgcggcagaatcagcagtggattggattcgcggatgagacacgcgacgggttaaaggagatcggggatgtgcagaactgggcagagatgattgagcgtgatttgctagccttggaggatatgatggatgttgttgagagcggccatggggaacatgggagtgaggatggcgatgaccggggggatagtgatacggaactggatgacaacgcaagtgaacagaatgggaatgttgatattgatgctaatgggaagaacgtggatcgacgaccgaaaggatggttgcgatggtggtgatggttgtctttgttcatttgatttgttgttcttatttcacatatatatcacgcgcagggtatcattatggattattctccgtcttcttcttcatcctcttcggcttctccttccaagtattgtttccaggggtctagtccttcggtatcctggtattcattccattcatcccactggcccagactcatcaagtgtcgcatagtcggtcggccatgcgggcagttccatggtttatcaatagtacccatgttccgaacgactcgttccatctgccggctagtcaaagtctttccgatcatgatacttgagcgacaagcgcgcatagcaaacattttgcgcactttgcttggccgtggtactgacgatccatttggcgttgaaattgactctgacagcaacacgatcagttcctccagatcccgtacaccgaacaccacttccttgcttagcggtaacgagaccagctggcatcgacgaccgataggctcatcgccgctttcgtcgacagtcacgaggaacccgtttttctcaagggcggcgcgattctcaaggacaacctcttcttcaacggcagtgagatcgaggcgttggggacggacgagtcgctggttttgcaccacggtttcagcttgcaggcgctcgaagttaattttctcatcagaggcatgctgatcgatgatgaagagctcatcttggtcttctcctggacggactgcgatgataaagcccaagttgaactggccgattatgcgcatttgagcgaaatcgttcttgcttacaatcaacgaaagtttgtcctcggctgtttcttcgccaagatcagtgacttcctctctcggtttcttggtaccgtctcgcatggtcttttgcaatgtgataagttgggattggagacgtgcaatagagccatctaccgtaccgataagctgtatagtcgcgtcgcgatgcgcagcgcccttgctcattttctttgcacggttcgcgctgttttcttcgggaagtacagcagtctcttcggcttcatgaatcagccgttgaactgtagcctcttcctgcgccttcttttgagcttcaccgatattatcaccgatattatcatctacggcagtttccttgtcttttgcctcggtgttttcgggttctgattgagctgcactttggttgggaacgtaatcagcattctcgggcggaggagagccctcctcttcagactcttcttcagcgccttgtgtgtcctcaatttcacttgaaggattacttccatcttcctcaatctgatcatcttcactagcagatgcctcttcatcttcttcgtcaaccggctgcgacccaggtgcagcaaaagatttcatatgatcactgaagatattaggacgtgatggtgtgtgtatcagtctcttccgccggggctgcgctctgattaggggtggatcttctgcaactcgttttcgtggaagaccactaccgaccatggacgttacggttcggttgccaatagtgatggtagcaagttcggcaggttctcgtcgtgggcgcattcgatcgaaggcattctggacaatgctgggaatttcttctgggtctccacgagcacgagatggagtctcgtcgggagctgatggctgggatgatggttcatcggagataagggctggctcggactcttcctgggcggcttctgggacgaaaagttcatcgtcggagatcgccgcggcaggcgtttctagctcacttggggctggcgtcgacatcgaagagcgatcagttgcagcacggggtgttctcattgatcgagccggagatggtgtgacttgcgtccttcccgtgcccgcctctgagctcgagaaacgctgaatcgcactctgttgactcgcccccgaagtctccactgagctttctttcgtccgatctcggcttggacttctaattccaccgttttcactcagctcccgagcagtgacgaaccctggaagtgatgctagtggttgctgttttggcaaaggcttagatttaaccgatgactgcggcacagtttgttccgcatcaccaaagagttgagtaagagaaactttgagcgattcaatcatagcccctgcatcatgaagcaaaatttggcgcttatcgggcgaaacgttgacatcgtaagcgtttgtatccatctgaaagtctgcgaagataaacgctgactgtgagacattgaacgacttgtaaacctcgttgaacgccttctgaatctgtggcaggccacatggccgcgagttgacaaagaacatctgacgatccggagtttgacggccctcgccgaatacaggacgtgagatatgccctcgcacctgaattttactcagttggtcatcgcctatccgtttcgtagccgtagaaggctcaaactccagctctagatcgagggatatcagggcagataaggtcttcgcgccatacacattggcaatattttccttggtagtcttatttccatttgtcgaaaagaccaccacgttccgtgtcttaccaacagtgttcctgacactgaatcggactccagtgctgatgcatgcataggcatgtaagagattcagaaccttcccatattcccgcttgatgttcttctccaattcccgccgacgcactggaagccgcttgaagatgccttcgaccgacgcagtcgttcctttctgtccagccacgatctgtgtctttcggagtttcccagattgttcaaagtcgagtctattcgcgcgaggaacttgcttttcttgtgccgtgacgatgtgaaattcagccaatgcgcagagtgaggatatcgcctcgccccggaaaccgaaggtgtgcaggctcgagaggtcatcgtacgacgataatttggaggtatagtgtttcaatgctaagagaagagtacaagtcagcttgactgcaatgcaccctgagagaaatgataactcacccacgttctcatagttctccggcgagatcccgctgccgttatcttggacctcaattaggtccagtccattattcttgaatcggacctctaaaacccccaaatcatcagaaatatgtcacaaacaatatgccgagctgtttactcaccgattgtcgttgcgcccgcatccagactgttttcaacaagctctttggcgacggagcacaagtcaacgatgacttgacccgattggatttggtgtacctaattaatgcgctggtcagattgggacgtcgggaaagacatcagattgcatacagagcgggcctcaatggcttggattgttgccatgttcatcccatgatgtctacagaggagaagttggcacgcgtctcacttaacgcgtgggtttgccaagaccgcggtgagccagttgattatgacaagctcgatccatccatggattcgatgacgcccctgatgttttatttacgttgcaaggacataattgaatttgttcatttgcgaattggatagaaccgcaactatggatataaatcaaaatggtcaattaggagcaacaatatcgctcttaacgcgcacaatcaatatgaaaaaactaataaacaccgaagcgatctggcagcataacaggcgcaaccagagtccaaagatagatagcatagcagacccaggcgctgacgatcttcacccagctggcccagtatgtgcggcccaccggtgcgaaatctgtcgtggtctccagtgtcagtccctggactaacaaagtggctacccacgttgtggcgaggaagaagatgatgtggaagagcgagtagttgtattgtgttgaactacgctcgtcgtccttcgtggtttcatagtcatcttcgtcgtcactttcatccagggcactagcaggaagactgccgctctcaacagcagcccggagaacttcagcgcgcatctctcgacgggcatttggttgttgagtcaccaagccgtgctcgttgtcatccgtgcccagctggatgtagctgtggccgcccttcgatcccaaggcaattccttgggtagcagcgcgtgtggtggtgtatgcgatagtcagcatagtgacaatcgcaccgaggacgatagtggcagtcctagttccgcgggaccggatgagggggttgcagttcttgtcatccggttccattgaaacggcagacatggtcaggtaggtgcagtagacagtgaccattgcagcctgagccagtcctgcgcgagagttcgattcttgcactgctggttggacagaaacgaaagagatgatcaaaaacacaaccaggttaacctgtgacgagtcagttaggcgctaagattggtggtgtgggatacatacggtgatagcagcctggttcatagagcaaccgctcttcgcgaagaagatatacatcaggatggtcatgaccaaagacgccaagtacatgccgagggtcgaaccaataagcagaccgcgccacacgcgagagtcgctatcttcgatcttctgcaggcatagctccgcccacgagtgcgcaaggtccaccagaaggatcaaacccaaaagcaggaagagcatggcgcagaagaaggcgatgtagttgccatagacgaagaagaagggttcggggataaagaaagacatgacgataaaggccagccagaggatgaccttcggaccccaaaatccattttggagagcggcgcgagtatctttcgagcttttgacgccaagaagcaaaagggcgaggagtaaatggaagagaccgagggcaaagttaatacgatggaccgcgacccagccgtgacattccttcccgtcgcatcgaatctccatataatccagtgtcagatgttgcaatttcttcagggcccatggcgtgagcataatccaggagagtatagagttgatcaaaaggatgaaggcataagcgattctcgtcgccatactgtctttgttagtccgagatcctccgcactaggcagttgagatggtacctgttttgaaactttccgcaggcgctacagactgcagagcatgtcgctgctccacagcatgatgccgtgactgtcaggatctgttgaggaagagaatcaagttagcaactgtaacatggtgaactggagattgggcgacaacatacagaaccaacgctcggcacggccaacagcgggatggaaaggagggcacccatattgggagtgcgtgtataatatagcccactgtcttagttcgaatgtaaaaccttggaactgaaagtagatccagaatcgacaagagtgtggagagaggcaggtgattgaagatcgtatgaagccgccttcgtcatgaatgttacgtaatatatccaaatcgaaatacatcacgtgccaagtctcttttggcctgctattttaggattagcgccccgctatctagcatgaccctcggcatcatcatcaacattgcactagagggatccaaaaagtatgacattcgagctagttttcaattggtggaatgatgacctggaataaaagaaagggattccattcgttgagaacattgattatttcaaacaaaccttggaagctcggtaactacagagtactccgtatagatgagatagtatatcatgaaatgtatatatcgaggacatcccttattgttgtaaatacaatggacctatttagacaaagaaacaacagatcaataaatcaaccgctctctctctgctcggacttgattggacttgactacatgtatattcctggtgatataaaaccgttggaaatcaggcaacataaggctgtaaggcatccaatacaaatccttatcgcgcgtggagaaacgcacttggccgtgcactcgaactatgacgagtcccgattcgcgcaatttcggggaatctgacggattgctgtgttatcaacgcgggatgcaacgtagaacttagatgacatagtacatctcttactacatctctatttctctttttacccctcctcagattccttatagaaatcagtttattctcctatttgtgcatctgacgtggagcaaccttttcttggcacttgcttgacggctgttccgaccacgcggcctccgggatcatctccaagtccttacctaagtgtaagctcctgaaaactcccaagtggccttattccttcaattcctcctatataactccattcgctcttttcacccttcttgtccttcattccggggatgtttctcccagtgtgggcctcacatctgtttacctagggcctagagcgcttgtatcgcacaagatatcaaccaaaacgaaccgtagaggaacgacatcatgtccggctctctacaccgaactgcccggattatttctgtcattgcggggacgctggtcgccctctcatgcggaaccaatgtgcgtgatatctccggtctcatccccattcaggaccattaaggttaacccatcttagtatgcatactccgcgtgggcgccgcaattcgcgcagcggatgaagctctcatccaccgagagcaactttattgtgagtaatgccatgtccggtgccgggaaacgggttttaacagtgtctagggtgtcgcgggaaacctggggatgtatgctatgggaattccaatgggattattgacagatgcccgcggtccccgacttgtcgccctgatcggctctgttggcctaggcctgggttacttcccaatttatatgggtatgtgttgaggttaccttgtcggaattgagcagctctaatgtctgtagcatatgataatggccaaggatcgatgccggttgtgttcctatgccttttcgctttccttactggcatgggcggttgctctgcctttggcggtgccatcaaaacaggtatgttacactaagtaatttgcttaatagagttaacctaatgattccagcggcatcgaacttccccgaccaccgcggcacggcaaccgctttcccgatggccgccttcggactaagcgcgctattctggtccaacctgtcgactctcattttcaaggacgataccggccgcttccttctgcttctagccctcggaacctcgattctgtcctttgcctcaatcccattccttcgaatcctccccagcgagccgtactcatccatcccacatggcggacacgagtctagcgaccttgataccgtgctagaggactccgatctacatggctctaccgcttttgatcacgaacaataccccgtgcatgcgcggtcgcactctgttgcatcgaactcccaaggcagggcattcagccatgccgatgagactgccaacttggtatccaagcacgaccgcccgcgtccctctttcgatacacttgacgatgacttcttggatgaagtggccattgaggcgcaccaaactgatatccgaggtctcgccatgctccgcaaagtcgagttctggcagctcttcttgaccatggcactcttgtccggtatcggcttgatgaccatcaacaacatcggcaatagcgtgaaggccctgtggctgtactacgacgacagcgcaacagacctgttcatccaacaccgccaggtcatgcacgtctcaattctctccttcggcaatttcctcggccgtctgtttagcggcatcggctctgacctactagtcaagaagctcggcatgtcccgcatctggtgtttattcttgtcagcggtagtctttaccctgacccagctcgccggcaccaccatttccaacccgaacagcctcgtcgttgtctccgccttcactggaatcgcttacgggttcttgtttggcgtcttcccttccctaaccgcacacactttcggcattggtggcctgtcccagaattggggcgtcatgacactagccccagtgttcagtggtaatgtcttcaatttgttgtacggtaatatctacgacgcgcactctgttgtcggccacgatggcgaccgcgagtgtcccgatggattgggctgctaccgctcagcctatttcatgactttcgtttccggcttatttggtatcgctgtttgtctgtggaccatcatccgggagaggaacattgataacatcatgaataagaagatggaccgactcgcctgagttggataatctaggcgcaatagtacctgcatggcaggcatgtgctcatgaattgctttcttgcttgcatatctatctcgatctgtttgcagtttgttatgacttctcacagagtacatttcatggatattatttgggtcctcatttctaccgtttctctataaacttgatactttctttgcctgtctttatttgagttaccctaccttatacgccagaacctggccaatttcattattgtacatttggagaatatgcgctgctgttcaaccccaagtagttactaggctcgtccatgttctactcaacccagctcttagaaccactacgagcaaagattctgcatgacactttcattcccgtcctaacatacatatagaatatcgcagcgcagaaagcgagaatgttgcctcaaataaatcaaaaacagaaatcccggcgctcagacacaaaaagctgacctaacaatcaaaaactgttgcattgcattgctctattaaagcagcaaactaaaataatgatcattggaagcgccaactagcacatggagggaaacatcccgggcaaaacacccagacgacgagacatctcccagtttgatcaccgattcgatcttccagacgcttgagttccgcaagaagagaaggatagggaccaagtattgtattagaagcatagtggaagagttcgtacagcgcaccgcaaggaaagcaaattaacaagatgtttggagaaacatccagacataacaaaagtaagggaaaatcgagaccgttcaatagtagctttttttgggtaaagttccagccagtgatgacgaaggagccatgaagggtatcaagaatatcagaggttggatgagaccagcaaacgtaatgtagcttataagcttgtactacccgtggaccgatgatgaggagaataagcaggtggaaaagggctggaaatagcaagatgccgcaagatctaaacgctcttgggagacttgacaagtacatcctcgccagattccacaacatccgacaggcggatcttttttgcgagcggctcgccggactcggcgtcaccagcgccgctagaaccgagctggcgctcgagatcgctaatacgacgcttgagatcctcctcgcggcgctgagcatcctccagagaccgtctcagacgaacctcggagtctcgtacaatcatctccgaccgacgcgcgctggcgtcactctgctcgagttccgtcacgcgaccgcggaagagctcattgacgaactcaagttcactgacgcgtgtcttcagggatgtgtttagagccagaagactttcataggtgtggggggaatcgagttggcggtcgactgccgagggagagggctggcgcatctggcgggaggggaggccgctggaggagttcatgctatcgcctagggtgacgctgtcgaacatgtgctgcggtgcgatattcgagttgtgcgcgtgcatcgagccaaagccaggtgtctcggtccgggaaacgggggagttggaacgatccgaatgacccgaggacatcttgcgcgacgcgcgacggtatccatgcgagccgaggggaggaggagttcccgcctcagatcgcggcggaatgccattggtatcgacagggccgcctgactatagaatcacagtcctgattagcgcatgttcttatctaagataggtgggattggattgggcgtaggggacggggagaaaatttttttgatcgcgaactcaccttgcgcttagggccctgaccagtcttcacgcgattgcgacttttaatcacatccgttttcaagcttatcggacgaggtcgaccatgcagtttcaggaacagtccacatgcgttgcagaggactgaaccgagttcgtccctacgccacaggggcgtggtagaggtgccgcaattttggcaaacaggctgtaattgaggtcgcttgtcgtcagtcaatgtggtcgccattatgagggtatagaagtgaggaagaggaagaggatgataagattgtagagatttgagtcgataaggaaagggaaaaagcgggtgcacggatcgagtggcgccaagactttcgataactcctcagagataagacccagcgcgccgataacacatatttcacacttacaggtccactcccttgtcctcctgtcgtagccgctggtgacgacgtagcgtaggtcatatttgccatacccatactcgtatcactggatgagctaaaaatgggaggggaaatatatggattagccaattgattcgaattcttatgaggggccagattactgctctccaggtgcccgagtgaagattacgcaataagataggtcgcccaaaggtccacgggtggcttccattgaggactggtatggggtatcaacgcaccgaagattagaggttggtgccgaagcgaccgaagccagtgctgcaagtccaggaagcgaggtgctaacagaagagcctgggtatccgtcgctctcgcctgagccgaatttggtcacgctcttgatatccggcagtgtcgtggaaaactgtgtcgatccgttggacgcgtgacgggtcgaagaattgtcggcggacaagtcgtaagggaactcacgctcctgcgaagaacgggatttgatagccgggtcgatgggcgacgcccgatagagggtggaagccaccgtggagggggaaagtgggtgttgattgaaatccggcctcaaaccgaattgaaagagaaagggtaggtgtcgaacgaatcgcgcgacgggatgcgaatgcgattgggaacaacggactcggaacaggactctaggtcaatgggtctatatcaagacaattccttcagtgatcaattcgatatgaagttccgagcagtaatgatcgataccggaaaggagcgagaggcttaggcccgacaattcttgtgcctgaagaagtaaataagaccaaagaacagaacgaagacttaaattaacgacatgatggccgaggattgggggtaggggttgggaagaagatgcagaattgagatggacgataagacgcgataataacaatcgggataacgattgccccagtatcgactattatttgatacggcatgtcaggggcgtcacgtttgatgttttgtctcacaaagaatgtatacaattcaattaatcagctcttcattctacgccacccagcctcttgatatctggaagcgcaaaaaatgaatccattccgcattatctggttcgcctacaggtgatcaacgggttttatgcgtataatttcctgcacgagcggatattgccagcgtggcggatttagatttaccaacattgatcgtatgtattgaattgacgtcccctgaatatcccaattcgtcatagaggggtcccatatggagatcacggtgctagccaagcttcaagggctttagagcacagaataagtcgatgcatccatccatctaagaccccttgcgattagggggtggagaccgagtgtggcggtgcgtaatggtataacggttattaactaggtggacctgcccatcccacgtaatttaccgcgttctgccgttaattacgacaccgcctgcgtaaattaactgtaacaatgttttcgggacgcccccttgggcgtccggacataggtgaccacttatttcaaccgccttgactctatcaactctttattctatccaccagcggtcttttccttcttctgttctctgtgatggattaaaaattgtttggtgtgctttcgttcttttgccggccttcctctctttttcatacgggttattttccccgttttcatcttccatagatccaaccaccctcaataacaatgccgaagactcgtcctgccacttcgggatacgcccggctcgcccaggccgaagaggaaagaggctacctccacgatgagtccgaagacgaggatgtcggtgctttctcaacagcgtccacctccgctccccgatacgcccccgtctcctctagagcccagatgcaggcgtccggtctccacacccccccagcccatcgacgcagacacagtggttatactcaaggccgtcggaactccggagtggatatcaaggccatcaatgcgcggctcgaaaaatgggcggacgagattgcctccaaattcaagatcaaccgtgtcaaagggaagagctatgaggaagagaaactggagatttaccattcagtattccaggcacctcccggagttatccccgtgaccgccgaagctctcgaatcggatgagtttgagggtcagcaacggcgagcccgcgccgagtacgaggagataattgaaagtgtgcgtcttgcaattgaaatggacatacatcctcggatgatctcgcaaggaagctcgggcagctactttgctcgaaaccctgaaggtaaagtagtgggtgtgttcaagccaaaggacgaagagccgtacgcctcgcgaaaccctaaatggacaaaatggctccaccgtaacttgttcccctgctttttcggtcgcgcgtgtcttattcccaatctctcctacgtctccgaagctgccgcatacgttctcgatgcccgcctgcgcacgaacctcgtcccttacaccggtattgtacgactatcctcgagatcgttcttctacgatttctgggatcggagaaaggcatggaaaggcaagaaagttctgcctcccaaggctggcagtttccaagtcttccttaagggattcaaggacgccaacattttcctccgagaacatccctggcctgaccaggtgaatactggattccgcacctcggatgctccgaagcgcaagaagcggccgtggaacgaggcctgtcgtccatcgggggcacagtccgacgatgaggatgacgacccgggctatgtgccctcgcccgacggttcgcgtgatgaaagtgctgagcgccggttctactggaccgagaatctcaagcaatccttccgcgaagagttggagaagcttgtgattctggattatatcatgcgaaataccgatcgaggtctggacaactggatggtcaaaattgactgggggacagagcaggtttctatcgtggcagagcccccaaaacagactagcccacagcctaagcacgatgaagacgagcttatgcccccagctcgtcctgtttccgtgaattcaaatggcacttccaatccctccttccacccttacaggcgacatgaaacaatgatggctatcagtcgcacgggaactccattagcctcatcggaacagtcagcttctgtccagcttggtgccatcgacaacagtctttcctggccatggaaacatccagatgccgtaagttttcgaatacgcgggtagttacttccaacactaacaacttgtagtggcgcagtttccccttcggttggcttttcctaccagtttccttgattggacagcccttctcgcagagaacccgcgaccatttccttccattgttgacatccacggcctggtggagcggtacccagatggctttgcgtggtgtcttttcgcaagatgatgatttcaaagagagcatgttcgctcggcaaattgctgtcatgaaaggccaagcctggaatgtggtagaaacactaaagcaaccggatcatggcccgcttgagctgactcgacgaacccgcgtctgtgtatgggatgacttagttgacgtccccgttgctatcccgatgcgcgcgccttccacggacaagcaaaggaaccaacatataaggaaccaacatatgaattacgaccctgatgaagaagagatggatattggtgcatccgcatcttcccaaccaatccccgaacacgatttattagggttgaattcgtcgctaagcgacctccccaacccaaaccggttcgaacttacccgtggtcgaactgacgctgacagcgaacgtgctgatggttctatcggtagccctgcaactataaatgacttcggcggccgaaacactagaggttctctagacggatggccttcacactcccgccagcacaagaatcgcaaaaacggcggtgccgtacctttccgtgttcctcatgtcaacacatttggcagcgatgatctcgagggtgaccttggctatgcagttgcagagggtatggaaggcaaccagcgcaaggtgattgtcgagcgcctggaagccgtcaagagcaaaaatcctgttttcacctggtgctaaggttagattatgtcgtactacccttttcgctcttcgctcttcacttttcacttctccacattcctacattacttctctttttcatttaatgtgcagctattttctgcgacgttgtcttctcggggtatttgtcgggtccccgtccttcgggaaatggttcccacttcctcttcatgattcgaccgtgccttttttttcctgcgacatttcacacgagtcctttgctggacatgctcatgatttgggagatttccttgttgtatatagacattctttggctgttggggttaccttaggctatggcgcattgattgggcgatctgcctcatgtagcatattgatgagacctaattacatgatacctttatcgtctattctttgagtcaactataataaccggttagctagtactagcatgtgactgcagcatgtagctaggctggggtagacgacgatgttagtcactacaccatattggatattagatgaaggaattcacccaaatgcctacataaaccaaagtaacagtaagtggtttgtggacttactccaacacatatcttacaagattgatacttcgttctgttatatattgtgctgtgacacagagacgttggtttacacgtttgaaaggtatcatgtcgtgttgggaccatctgcgaggacctcttgaaactgctatattggattcagaagaatctatcgccttaaggtgagatctctgaatggatgcattaatatctccctagagatgtctactttatatccaggcacacacagcttattactctagcctaggtaaacaactcaaagccacgcgtcttcggctacggagatttacacccctcatgtattccgtgggacttgtcaagtggcaatgagagccacgacttcaggaacgtccacgagaaagcccagtttgttgtttgatgcagacctacatggacctcatacatatggtaatgttatggtccctgtggtaggtgaagccgcatgtgctacggcaccctctgcctacactgtctcgtgggggctacggcgagatggtggtcagagggatgggcagaggagaagaaaaagagaagagaatttgggggggaagggacccttttatacccccaacccacgtgccttcccaaagtgcgataccctccatcgcaccttcctggaatcacaaatgtcacatcggccatgatcatctttcttttccatatgacctactcatcggacctggtccagctcactgttctatttagggtcaaaccgacctgccctccttcgcatggccggcttagagctgagagtcaacctctgcgtaaatgggcgcagtggttctatgacctgaatctggctactcagtctgcctagtgtgtaaagggtttaagaattcgttcattcgatatcgacccataagagctaatattccacgacctaagcaaatactatctatgcaacaacattcgaaaatattgacatcttcaaacaactcccacgtgtgtatgtagcatgaagtaccttataactatgcttgcaatacattaggctagaaatcgacacacctcttccaccacgagaccgagatcgaagttctgcgggtgcatgagctggttataggctaagatttcaaatagctaaacctctgggtcaacgaaatgaataggtatatcaccatctctcgagggctcgctcatgccgaagatcttatcctctaatttattccccacagacttccagtaatctccctgttgatcttgatcctttagggctttgtgggtcttttcgacatcaaacatgtccgtgatcagtccgtgttgggccagatgttcgatctaatgtctaatttgttgcatttgaccggtttgccacgcaaaatcgtggatatcactttgtctttgagatcgggaggcccacggccttcgagaaccaactggaaagcagttaccatggcattcttgccaatggctgccgaggtcctttagataatcggcaattacagtagctttcatgtcgccggtggcatcgacgtggaagctactatttcaacggtcaagagttgtgctcaaaaactgcatttggatgggcctaggctgcccaggtgcgctcaggcgcagtcatccagcttacatgatgaccaggtgatgattaactaactagttcagcaccacataaacatacagtagtagagcattaattcatttatggattaaaatatcatagtcaggcaagtcaaagcagttcatttaaatcagaagtatacaaattccaatcttggaagaaagggtggctgctcaattttactcagtggcagaaagcggcaagggctaagcactaaaacggaaaatgaacgccaagaagcacgcaggtaagcgcgcgaggactgataagatcttatcggcgggtttctccgaggcacagacttcagtggaagaaggacttcgtcatttcgagttcctaacaacgcgaccgagcttgcgactgacttgagcaaagaagttgcgcgaaccaaaagacctacagccagaacgactcgaggtccaagacacttccctcgaccggtacaagagccacccacgattccttcgacgaggcaaacgacaaggcgccgactcgatcgcgatcaggaaaacgacgtgatttcccctgggaaacatacgtcggtgactgaggcaacagcgcaactagtgttgcccgtgtttctcttccttatctctcactttcaatgacgccggagatttcgcgaccctcgcgtctggaagacgcacctttcgttggccacaccgtttgcttaatcactgcgctgcgacgttagtatttgacacatgatatcaaggctcaagggtcttgaacttgattgatatcccctcacaagcaaaccctatgacaggtcaggcaattaatcaatcccaaatcgcaaccgcctatctctcatcctaaatcactcgacaccgctgcgaatacttctcacatttgagcctggacgtaaagcttgccagtctggcagaacttggtcctatatttccaaccacggcaagtgaaacaaatacccagccttgttgcctctctcatcaactgactttcatcagttttctttcacagcatcgcccaaccctgaatccgaccaaagcctatcccgggtttttcgactaccattacaaacatcatcatggcatctcatgctgcgatgctcttgaaccccaagggcgctaaaagacaagctcaaagcaatggtaagcctccctttgcttcttccccagcgagtgatttgtctcccgtgggtgccgtcgctatgtcccgtgaatttacctcggacaacactaggcccgtgacttattcttctgcgctttcttctcctgctttccctgatgcttcttcccatgtttctacacctactcatgtgaacacaatggatacttcggccatgcctagagtccttcttgacatacctgaggcatctgtccatcttgacacccagatagacactcgacccacgtctgcggatatgatgcattcggctgaatttcgtctccctactgctcctcagatggatactccggttatgcatacaaagtctctttggccaaccgactctgtttccccttgcgctctcaattcgcttgatccaccttcaagtctttcttcccacaattcatcttctcttgtcacttcttctccgacagaccccatgcatctcgaccccacggattcccagggcttacttttggaatgtacaggaaaacaccacggaaatagttcatctcctggctctcccatggctaccgcgggcactgcagccgatacacgctttcaccaatccactagtcgcacatctccaagtgtgccatcgatctcgaccccggttgtgaagccagactccaatctgacagtgcagttcaccaccacccatgatgaggacatggaaagcgacacgaaaagaagtcaccgcgagatgagtgaggatgaagacatgacctatcgacccaatttgattgaaaatgtctatggagttgaaaaacggaagaaccaaccgacgaagaaggtcaaaaccgagcatgagaaaccgaatatggcgaacggaccggtctcaatctctggaaatagcgggcttgggaaatggatgaaagaggatgatgcgaaatcaacaccaattcccactacactcaacgtggtggatttgacagcgggtatgagctgctttatttctgcggattgtgttgaaccaatctaatgtttttctagaccttgcgaacacacctaaggaagatgacgaagtcctatgcactggttcaacagatctcagcgcccagcgtgtctgcttcggcaagattgaaaacgcaatgatcatggcccatacagtccctagacccggtccctctgtttttaccgactggtcgcacgcttggccgtctatcaaactagacctgcgacgccagcccgtgaaaggcaattttcagatcgacgtcgcggacccccacggcaaagttttcggtacaattgatcctaaaacggcacaaggactgtgtccgctcctggattccgaaacagattttatcgaggtgacagccttattggatatccgaagaacctcgccgaatgaagaaatttgggctcctacctccgggctgtggcgtgcaaccctcaatatctacggccaacgaaagcacgcagaggctgtcggcaattttctctctcaccgcaacatctggctgggtcctccgaattctgtggacaaaggaactactgtgttcaacccacatgcagagagccgacgccaacttgccgccgcaagcgctgccgccaacaactccgcgcggtcacgcccagggccagttgtccgatatgaagcgcgaactgctgaagaggctaatgatgcagtcatgaagatgttcgaccagcttgccaacgcgaacattccgacgatggagccgtctaatcacatcaccacaccgatgcttcatcatcaaaagcaagccctttggtttatgacagagaaagaaaagccgcgcaaatttggccgaaaagaagaagacaataattccttgtggcgaatggaacttgcgcccaacgggaggacccaataccgcgagatcattactggtatgatttcagggcaaaagcccgaggaggccctaggtgggttgttggctgatatgatgggcctgggtaagactctgagtattctttcgttgatcacctcatcgcttgggttagctcaagaatggaccgatatggctcctgatcccgttcttgttcgccgagctccgggaattcgcaacacacgaacaacactattagttgtcccgttgagtgcagtgagcaactgggttacacagatcaaagaccatctgaagccaaactccatcagctactatgtcttccacggcccatcgcgcatcactgatttcaaggcgctttccgaatttgatattattatcacgacatacagtaccattctcagcgagatctcggggcgtggtgccaaaagtggaaaactcagtcctttaacaaaaatgaacatgttccgaatcgttcttgacgaagctcatatcatcagagaacaaaatgcggcacagaccaaggcgatccttgggctccactctgagcgtcggtggtcggttaccggaaccccaatccaaaaccgcatggaagatctcctgtccgtgaccaagtttttacggattgctccttacgaccaacgaagccaattttcccaacatgtatccaacccggtcaaaaatggtgatcccaatgtacttgcgaggctgcgagttctggtagattcattcaccttgcgcagagtcaaggacaaaatcaatctaccacccagggaagacaatatcatcacactagatttcagtgagcaagaacagcaattgcatgagttcttccgcgcggaatcaaatgtgatgatgagtgtcattgctggtcaggacaaacgcaagataggtggccggatgtatcaccatgttttgaaggccatgatgattctccgccaagtcagtgcacacgggaaagagcttcttgatattacagaccgggagagagtcaagggattatctgttaacgatgcaattgacttggaggagaacaaaccggaggacaccccggcagccatagacaagaaggcatatgagatgttcgcgctaatgcagcaagcttcggtcccccgatgtggcaattgtaatcgagaactcgatgaacctttgaatccaatgggagctgtcgaccgtgacgctccgatggctattgtcctaccatgtttcgatatcttctgccccggttgcttctctggctggaaacaaacctacgattcgcatcccgagactgagacgcgttgcccgaggtgcgaaggctggatcaacttgaaatactcgaccatcacgcctgctggctttgaagaatacgaggcccaaaaggaaagtgagcggcaaacccggaagctgggcaagaatttgggtgaatacgaaggcccgcacaccaaaaccactgcattggtcaactatctcaagcaaagtgttgaagacagcaagaagcttgaaggcgagtcacctatcaagagtgttgtgttttccggatggacctcgcacctggatctcattgagattgccttgcaaaacaacgggcttgacgggtttacccgacttgatggtactatgactcttgcagcacgcacaaaggccctcgaggaatttgccaacaatgacaatatcaaagttcttttgacaaccattggtgccggcggtgtcgccctcaatttgacttctgcctcgcgcatcttcatcatggagccgcagtacaacccagctgccgttgctcaagcgattgaccgtgttcatcgccttggccaaactcgccccgtgcaaaccttccaattcgtgatgaggggcagcattgaggagaagataatggagcttgctaaaaagaagcaggagatggctgacacgagcttgaaccgcgtcaagcgggacaagcgcgagacccaagaggctcgcatgcgtgaataccgcaatcttttcaagtaaattctcctatcttttgttttcttgccttagctcgcattcttttcatgttcttcggttctccatttacgtctgcggtttctttttctgcttccatttgatctttttgtgatcttttttgattttcatttctgccctaatgctagtggctcgctggtttcgttttgtgatacccggaaaaggagaaggcgttaacattcattattacatctttgattctccttatgatcatacaccgggcgttttctttctatgtttttctttttacaacatccaagcacgtttatacacgggtttgttgttttaaccatagaaatcattttcttttctgcatatgccatttattggcttcagcatattcacatgcattagattctgcatactttgaatttgacttccaagggggtgtaggactcggatatgatttctgaatagagtgggatcgcgtatactcttcttcgtacggcgagatatgaatagaagaatttcccgtctagacctcagaatagtgcaatgttacgaacgagacttttttatcctactagggcatattcaggcataaaccctgtaaaatcaggaaccttcgccctccttttttttcaatcgcagcggacacatcgacaggcatgctgttttcgaaactcgcgtgcaagacttctccgttgaatttacctagaagtacttgagaaagatgtatacctcttcctcccgttcatactcatggtttctcccagctcttgtgctcgatttggtacctcccatttctttcagcaacataagaaaagtaaaaaatcacacttcccaatgacgcctacttggccaagatacataatcagcatcttgaggccattcagggagtatgtgttcatgattttgaccaaaccatcacttttcccccacttctcaccattgtatcaagatcttcccggagtttgttcaaagcaaaatcatcattctcaaactccgcggtgcagataccttcaggcaatgcggctcgcttttcagggagtaaatttccctgaacggcacacgaatcgaagtcgataatcactagcctatcatggtctcggtacctaaacataacgttacgtaggtgaggatcgttatggacaagaccaagggcatgaagatgatagatgccggccttgacgtattggagacaaatttcctggttgaccgagcgtccgtccctaaggcagccatcaagaatctcctcatacttctagaagcaaagcccagtaatccggccggcctttaccacgcagccaagatagcgggcgacgttctcatgtggaattttcatcaaaacctcacagattcgtgcttgttggagtaggtctaggccgagtgatgctgagtcgtcgtagccagtgagccggggctgcttgatgtagacgtccggcttggcaaagtcgaggcattgtgtgagaccatcttctcgaggcgggattgatcgataatggagagtagatcctctgggcgcccgactatatcggacacatgtatccaaaactagtcgtcgccatcctggaatatgacaacgatatatagaaattcagggtggccatcgaatgcccagcgctctgccatagaatgataatgcatcttaatgagacgagacagtgttgacagttctttctattaagagaaaagaggagagaaaacctggaaggtgtgtgctgtgaagaaagatcatgggcacggcgcttatttaagtacttttttggactaagaaatcttaggtgataaagcatcaagcgatgaacagtattcagggggtctattttaatatgggctaagagggtggcagcaggtgctgttacctggtggattgccaggcccaatccctacaaaatgacttgtatataacattgaaatggtactatcatgtggtattcgtgagttattcatgtgtctgtgcaatcggtaaaagacccccccccctcacatagcgccgagaatatagcaaaaataatgaaaccccacgccagtcctatctgtctcgtataactcccaaagtgcacataaaccatatatcctaagaacacatgatcaattctgagagtacccatctccatggatacccaccgcgacagcaccgagaacatcctccagccgagtccgcaactttctcaactcccgcactttcgcagcgcgctctttctcaacgtctctgagctctgtctccagttcccggattctgctctcttgctcggcctcggaagcgccaattccaggaagcacagagataaggtactcgatctgctgttccttgataatcagatcgcgcgcaagttcccgctgccgactcgcaaatgtgctgggtgagtccggcgcgggaggaaggttgggatctccaccttctggtgctgtccccggtgcagctccgggttgttgagggggtgcaagcgggggtgatgcatttccagcaacgacggctgcaccccccactttgtttgcgacggctgctgggaccggtggcgaggacgagttcttggccatcttggctaaggctggtgctgcgtcggggacattaggcggtggtgttgtaggggcattgtcgtggtatgttgtgagatagccaagcgttgcgtagaattgtgttgcgagctattttgtatagtgagcaagggtttaaatgtacgttctgctcgattcattttacctgatccaggcaagtctggagctgcgtgagaatgtcagccatggtagcgactcgaaaagaaaatgaaacaagcttgaagtagcttgagaaagatcggcagaatgcctgaaagaagcggagcaaatgcggagagaagctctaatgcggtgaggcgggcttgtctttctcacatcactcaatgcgcctgttgcgactgcaccatggccttgctgccggatattctcccttgagagtcagacaagatgcccgtcgttgcttttccagctccagagtctataatgagctgacaccgttcacccgccggctctttaaactcccctcggccccatctccgccctcgcaacaccacaatgatttgacgacatttctctcttacgccgagcatatttctcttccggtggcgagttcggtacatgtcggcacacactacgagtataccgttctcaaaaccctacgtcgttatgcgctaagcctcgaccgcatcggcggtcgtgacgatgccggcatcgatctcgttggcacttggcacctcccggagcgggaacgagaacgtgcactccgtgtactggtacaatgcaaatcactgaaggccaaagtgggccctaatgtcgtccgcgagctagaaggaaccttccgccaggcacctgtcgggtggcgcacgggcgagacggttggcgtgctggtgagcccgcgcgaggcaaccaagggtgttcgtgatacattagctaggagcacgtatccgttgttctggatgacgattgaacgggacggaaccttgaagcaggcactttggaatgcccgtgcagaggaacttgggattggccctctgggtgtggaaacacgatatggaaccacagaagacgccgagtctggctcgattacaaaagagatgatattgacctgggatggatgtgatatccccgatatggaccgcgtggagcaaaacctcgtcgagttcgccgagcaatgggtcgcattctggggtatggacttgtcggaaatccagaagggggagcttctggatgctgcagaaagagttctcccctatgatgtctcttctcaactgcttaataggaccgtatcggatgcagaccggaagaaggtcattcaagctttacaagagcgcctacaacagcagccggcatcggagtgaacactctactacccgacaatatgctatgtccaggcagccatagagctgaaatatataagaagaattgtatcactcatgacagaaaataatccaagggtatagaaacaccaacagcgatagaaaaacacgacttccagcctccaaagaaaaaaaaaaaaaaacgccagagagcacagacacccacaaaccatcgatcggcatgatcatccttgcatcgttgaccagaagtagtttgcgtagaagaagcgggagaacttcgggtcgatattaacgacatgaacatcgcccttgcggctattgcgaatgaccgctctgttgaaattacccgcctcatcgggctcgatatcaacaccaagcgaacggaatatcttgaggcgcagactagatagatattagcaagagtatcaatccaagaccgagacacaggcacaaacattgtcgcatcatcagcctcacgctcgcgccgagttgtttcgtcgccctcgagaccctgagactctaggtcgaccagtctttccttaagcatctccagctcgctctccaggcgctcgctttcaatttctagctccgatgcagctttggcaatgcgaaacttcttggtgtccaactctacaatctccgccgcgtgtttgcccgagtcgtgtacggccacggcttcttcatgctgcgtagatagagaattcaagtgacgtgaaagctttcgcattgccgactcggcctcgcgaatgcgcagatcgcgcgattgctggagggttgagagcgagtcattgatgcgtgtgatggcttgtttatcggggtggatgttgaagttgccgatcgtgtggtggatgagctgaaggcgtcagtgaatttcttaggcctaaatcatgagagcaaatagattagcacatacagttcctgggtcctcgtcgagcaacatggtgtcggtggttacaatatacagatgtcgggatagtcggttgttttgggtttgttgcggcagcaacagccacagcacagccacatatgttgctcctccgcaaagtgacgttgagcctgtgatttctccgtcctcgcttttgccttcacgcccaacgtgaccacgactcttactttcgacaaactacaatcaaattgttgaaactttcgttctaatcaatattcttccgtcctaaccaccaactgcatatctcgccatgtccaatcttccatgtaggtggttccgactgattgcctgatgcctgatgtttgaagactgacttgctgacttgttatgtcactccagacgctgctgatgcggaaaggtttgttttccgcggaaactccgaaagaaaatatcggaatcgtccgaactgacttgactatcaccgacacagtcccttgaaacccgcggagctacaggtcctgagagcccaatacgagaaagaaggcgactatgtcgggatccagacaaagttcaactacgcatgggtatcgtttatccagtcctgatcaggtgtgcccgcgctaaccggtgttccccgcctatgcggggttggcattgactatagggtctgatcaaatccaacatccgttccgaacagcaagaaggcgttcgcttgctttcagagatcttccgtggagctccggagcgacgacgcgaatgcctctattatctagccctcggcaacttcaagctagggaactacggcgaagcccgccgatacaacgatttgctcctggagaaggagcccgcaaacctccaggctgccagccttgggtcgctcatcgatgataaagtcgccaaggagggtctggtaggcgtcgcgattgttagtggcttggctctcgtcgcgggtatcgttggtagtctggtgatcaagggagccagaagacgataaacacctgttgaggattggcaggccacgacagcctaaagggtgtccgtctagagtataaccactttgtatatttttcgtgtgggatctgattccttggccattggcgatctttttattgtcggagcatccgagggcgttatatctttttctctactctttgtctctctctctctctctttctctttttaagccataagtatagttgtggtatgctacatacttgccaaaattgtacatgacccaggattcatctcatacatgcatagccctaggttcggtctagtagcacaggaatttggtcacatttatagattgctgctagtatatatctcagcatcgaaggtcacaagatgtcgattgtgtcaatcactaattctctttaacccgaacaatctttccagtctcaacttcatacacatagcctgtgataggaacatccaagacaagaggactatccttcaatatcttaatgtcatcccgaacactctgctcgacatccttgaaagccaaaaacgcaatatgatcggcgttctggtgtagatccgcacggatcttatctttgagttcctcgtcggtaaaagtgagcattccacagtttgtctaaaggtaatcagcaattggtccaaaagttgacaagatgcaagccagggtctaggcttagtcttggtttgtaggggttgcgtacatgatgcacgataacgatctcgcgggtgccaagcagctgctgcgagatgatgacgctgcgcagtgcatctgtggctctgccgccggcattgcggattacatggacatcgccttcttcaagaccgagggcgcgagcgggatctttaggatacttaggtgtgagtatcatccatcagaagtcagaagtactgcggagtatacggaccgaggcgcgcatccatgcaagccaccacggctgtctttctgaaatacagtcagatgtgtcttttgcaggggaccggggtaaaagttggagttagaatgagcgtcatcgacgtaccgctgtgggggtagctgcaggtcgcccttggtgaaggatgcggcgtatttggcattggctgcttcgaattcctttgcgacagacatgatggtttcagtatacttcaaatagattaatttagaggaccttggggtttgagaattgatatttaaagaacccggagaccccgcaaaggtgtgatatggcgaaagaaaggcaacatattctaccaatgcttggatggcgcaataatcttcagtccctgttttctgtcctaatttggtctgaagaatctttagttcactcgacatttgccctgtctgaacttgtaaggctagccctaaaaaggactactcctacacctgttgtaggcagtatcgccaccctagatttgacctaattatgactgctggctgcaatataagcgtggttatgaacgtctctagtgattgttgcaattgttgcaacttaatcaatgctaaatatagacaatatcaagccttgaactccttcttcgcaacccgttcagaaagctcacgcaagacaaccccaacagattcaaaatcacttgtctccaagtaagtctggccactcagacgagtccatagccaagggccatggtggaagactggcaggaaagtgttgtgttcgtccgtcaactgcgtctggatccaagcagctgccttaggagcttcttcctcagacaacacaaccaaagcggttttgtcggaggattcctcatttccggcagaagcaacagcaataggcaaccggactgtagtcatggcacactggcgcatacggctctcctgtccaggcttcagatcaggttcttgcaagacatcggtaccgagagcggcagcaacagcgtctgcgccttcatttgcgacacgttgggtgtaggcaataatagcatcctcgcctccgcagacttcagcgcggaatttcaacgctgctgcgacgcaaatgtacgcggagtcatcagtggtggcgacgaactcgaagagttgctcaaaggcagtctttgtcacgggagcgttcgggtcctgcagcaccgaggcgttaatcgcgggagaagccggggctgggataaatccccaagatgttggcaaggtggtgcgcataagatgctggttacgtcgtggaacgtagaggactgcacagctgcggggtgtgtagagccatctttatgaagccgagtcaatatttgtaattttgctgaagttattggaaaggatagaatactggggatagttcatacttgtgacaatttgataccaggtatattgaaggcttctattggtcaattgacattatcaatcacgatggacccactttcctctccttaattcatactacaacatacaacagtctacttttttacatgttagatatttacaacgtatcgataggaagatataacaactctaataatcacgttggggctagatattggcatgtcggagtataggatactcaatctcgaatcaagttcgaaagaaagcggcgactcgtgagaaagaccctccttgttagatgcgccctgcagacgaagtccatattatcactcatgtatctagtaaattggaagatatttcgatgactggagatatattagggcagtcagaattagtaaatcatttagcttgtcacgatcatcaattgcgatatattctaggtcttgactcacacaaacgagatattttagggaaagcattgcccaggtggggtgctcgacatatgtcagtctaacagattaaaagaagtgacaaagaagaaagttatagatggctaatattatctaggctctctgaaaaaccgtaccgctgcacttcttacccatcgcacccaccatacacttgacctctccatccatgttagacctatcagaaagcaaactaggtcaaattgcgctatactgtccagttgaactcaagcgaaagtactgtacaatctctcgcaaacacgatacaacaattgttgagagaatgtagatataagaggctgcattagcttccttactcctcacccatatcctcgctgtatgcatattcgctagtaatatccccgtcatccccgttttcgtcatccgcatcattgccaaggatgtactcgttgtagatagactcgctgtaggtgtactcgctggaggtatccgcgctgtatgtgtgctcactgtgggtaagcccactgtagggggactctgaggtcgcttcctccgtatccatattctcgtgattcgaatcctcctcatccgaatcctcacccgaattctcatccgtgtcctcctctgtgtcctcctctgtgtcctccccatccgaataatcactaaataaatcctcatcctcatccacctccgacagggccatgattttctcaaactcgatagattccaagtttggcaacttttcagatagagcctcaaagcccgcaatataaataatggttggtatctcaactcgaagattcaacaaccttgggaaaagcttctagacgtacacaagcagcggttagttatatcctacagcagaaggatagctattgaaacaaaccggaatccgaccagtaagatagtcccagtggtgaggaaatagttggatgggcgcattccaacgttcgatataaagtgtccggagatttggcatatttaaagctggggcacggatactctcttcggtgctccagccgcgaaagactagagcaaggtacaaagtgtgtaaattcgggaagaccaaattttctagagctggttgtaccactgcttcagtcttctggctgtatgttttcacagttgcaaccttcataaggtcggcatacatctggcgtcggtccggggagacttttaccatgacctcgtcgaggtgcatcccacctgatatttccatggagccccataatatacgtatcgcttcatggaaccacgtcttattcaccaaggcgcaattcaaaacccaacgtgggccattcgatgtgtatttgatccaaacgaggatttcacttactatctctggaagagctaaagctcgatggccactgaaagtcacaattttatggctcatgttggaaaggagtcagaactgatattgcgaaggaagaagtagaaaggaatgatatagtcacaaatgaaactaaagtgatgatgttgtaaaggatagatctctcatcaggaatttcctccaatctcacagatggctccgtgaaagaaccatggatcacatttgtctccggttcctgttctgatacgtagggagtaagtcttctcttactccgtatctctttttgtttctttgatttccgtgagaccctggtccatgcctaatgtttgtttgaaatgcttacagttgtctatctcatgatggagattatttgtattttacttttctgtttcaacccctcatcgtgatgatcctatgaagatagagtgtactccgtaccaaactcaaagccccgttgctattttgggacagaaatctcagactatgcctattgtaccagcaagatcctgttatagacgtaagttgcgtctttatcctttttgaaatcgtacatataatgattcccacataggtgagaattttaactgtttgtatatatggagcaatagggcgtgttaacaaaaggactagttataggtagtccaagaagctatgaatgtatgtagagcacgcgtgtctcatcaatcgggtactcccattttggcatctatgaatggtaaagtaaagtgtaaacaagaaaagaggctgcctctaaccaccccaatgctgcggctgtttcgttagccgttgaagtcatggctcatgtgtcatgtccaataaaaatataaaccaacgccgggtccaatgaagtcatcaataataatacaaacgctgaagcgttcaacccaataaaataacacactcaaaagagcgcacaagatccctgcatatcaggagctggtgtggtcccgaaatctcaacgccaaagcgggaaaaggcaaccgaataaaaaggcaatgctgctgacataaagcggaaggtagactgtgggggaaagattcgatattaacggacgaatctaatcagaaaggattcgggggattgctcactcattgagtctccacctggtggcttgttttgaccggaaccagactcccagtcatactgggatcctgtcgacgaggccgaaggagagtcgctcgctacccagggccaaacatttggggttacccagcttgtggtttctttgtgggttccactccagggaactgggacgctgtcgacggtcgcagtaattaaaggtgcggactcggtcgacgtgggctcagcggctttgttgccattgactttgcctccttctgcaacaattgactcccatgagccacttgtgtcaccatatttgtacgaagttccggtggagtaatccgtcacggtcattgacttcaggtacattttgaaggggccttgggtatagtctgtttcaccaccagcccagtctgcacaaacacaagctgttagcaagcacgatccaagtaattttcaggacagccccactcaccaattgtgccctgggcattgtttgaatcaccgccagcccacacaccgaccttgatcatcatcgggctctgtggatactggttggtgtctgccgtctcgggtgtgagaacacggacagtcttgccatcaatcgcccacacaatctgggtgctggtccagtcgatggagaaagtgtgaaattcatcatggtttccggcattatcgtggtaggcgccacggctatatgaagtggtgtctcctttgccgaagtaattggtttgcacttgagcgttgtttccgcccagccactcccagtcaatttcgtctaaatcgtcggactgcagaactgcactgctcacgattcccgtgcctgctgctgccttgatagtgcattccacgcggccgaacatgatgtaccagccggactgaatcagcgggccatcaccctgcttcgaaatagtgaaggtggcaccattcgttgagtcatatgtgacggatccagtggacttgaaagcatccgatgcaccacttgtgaaatcgaacgtcttgtcagattggccaaaggcaggatcagcgggacatgctactagctgttagtgacctgctgacacaacggaaattatgagcctcacttttcttggtcggattgcaatccgtataagtctgggccacgaccagcgtggaagagatcaggcctaaagccgcaccaagaaagaaccgcatggtgggccaagtcgagtataaactataagtaatcgttgactattatgcaataatgaagatgagttgttggagttgatacgagatgggtgacagaggaaggaagaagggcgaaaaggagatttccaagtgaagggagtaccccgacggtcttaagacaatctgagcaggtgccagcctcctctgtttccgtgccttccctttcggtcgatatgtgggtcccggctgtcattgggccaatcacatccatccccggatcgagattgtaccagctaccgagagcttcgccacgttgtctccatggagtttacatggagtcattctatgtagtcccccgtacattcgacgggtgtgcagctcagatgccaatgtgcaacagttctagtgtgcactgcatgtacaatgactatttgtgtgacaaacatattcgattgggtatttcgatcgagaatacgtacggggtacggtccgcactccatacttataacatatatatccattcgatgagaatagtctcctgaaagagcggcaaggcccaagcaaaacaacaggcggtaggggacacacgtatattaggacccacaatcccagcctctcgaatttactcttgcctattattagagatgtgatctcatgttgaagattttctctgcatgacagtgattcataatccgcctccatacggagcccttgtctcctatccgaaacaaatatgtgctaatactaatcaatagtcgtgattccaatgttcgggccagggctacctaccattgggcagccatctttcattagttctagcggcctgatgaatgatatgacttgaacgaccaacctgtaactttgacttaatgggcactctttgctgacctagatcttggtcgacataaagccaccgatctcagtggcgatcgatgcaagggcgatccgttgggcacgggaaaaacatagaccaatgagtcctattatgtttcgctaatgacttttttctttggctaagtatgaaaaccggaagaagaaggaaaaatcttcacaaaagcgaaagactactggtacataagaccgtgggccataagagatgccgtttgaacttactgtaatcaggatggtcggagtatagggctatctttaggacgcaaacttcttgcggtgagagttgttgatgagctttctaggtttttttacgcaatcaattctatgctttcagctactcgcaacgttgctgaatagatttcaatattctcatccgaaattctaacaatgtttgacctaattgccggcttttctgtgggcacagtcctgtcgaaaagactatgactactactcttcaaaccgacatgaaatcaacaccaattccacaaccgaggctcgtgcaaatatcgagttaggtctagctatatcttaggttctagatcaggtgtggtgttaacatataaagttccgagtgattcgacgcgggtttgtaacactgtcagttaaccatttcgactttgaataagcgacaatgggcacggaaaaatcatgctgctccactcgtcttgatctgcaggtgccgtggaatagcggtctccagcggattgctagacccaccttttagtgtgttgaatcatgaaactgttaggaagctaggctatcctacttaaattacattgctagactcttacattcataccgagtatgagctcgaagattatgctaaggtagtgtcatgaccgcatggacacactttcgacattccgctgttactagaatagcaagatgtagatgaatggtcttgtctaggaactggcttagagcgtagagagcacacccaggagatataatgtatgtctagggctatcgtttacgactagcaatataccctaagagcgtatttgatatctagatatttccaagggaaaaaaagcgtgcttcatcttcattcgttgcgcgatcgaggttacccgaactggttttgatctagcctacctgtatctcagggctgttctaagggcagggctattatttatactactgaagctctgtgtaccataatatcataatcgatgggttttgtttcgtaaaattatcctatccaaagtactccatatcttatagctggaatggatatatcacaggccggatagattgcaacgaagggaaaatgagccgtgcaacggttgcaatgcacttcttggcaatccaagctatcaccttctagtgaggccaagataaaatgaaaatatgagtaaaaccgtggaaatgctacaaggattgtttgttacagcctcgataacctcgagagtggaatcaccccggggcggggatgacggtctaatgactcgactataccccgtagaggcctatgcaatgaaagtatgccacacttgtatgctttccagagattttggttactttgtacaagctatttgcgagaaaatgcgaaaaaatagaacagaagactgtaaaagtcaagcagaataaagacgggggagctccacagcctagcacggacagcatcacggaccatacccaatgagaaaggttatatagtatctataaaaaagacctcaaagagaagaggtgaacaagggaagaaataaagaaatggaagggaatacaaagaatagtttcaactacatgcacctagtcttcaagtaatctagttactagtttagggtgaagatgttcccaaggtattctctcaagcgaagttgttggcgctaagagcctcatgacttccgacggcccagtacccgaagctcacacagggttattcttccatctctcccttattacatgaatctcatgtcgagcttcggtcctttttgatttttttaatagggatcttggctttgctctcgatcgtcattacgttgatccgcctttgtcacgagtcacgactatccccactctccttcttccccccccaattaaccctggacctcaataatcaccccgtacgccttgccagtatgcgcccgggttgcccttaatcgcaatcacctcctaagacctcatgaaataacgcctcattttgacactcgcgcccgacgctagtcttacggcctcggtctgcctcagcttttcatacgccgtcctccgctttcctcacgcccccgctagctctcccaactcctcgcgcccttggtgccacctcactgattttcctcgtccgcaattcaaattggatgtcctacggagtgtattccagctattatactctctaccgcgtcgccgggtcggcctccacaacgtggcgctagcacccgagacagcagaattgacaaccacacgttgcagctcccccggtcacccacaccatccgataaccatcggtttttttaatgctgggcagttctgaaatattaccatatcccaaggtaaagctggctgcaagttgaacagggttgccgtcgtggcattcggccgagtctgagcgcagccatgccggcgcgggaccccaaccaaccggacaaccgtcagggttcggacagctctgcaaatagttggaggtcgcaggataccgtgcgacactctgagagctactctcgagatggagatgaagcctttacgggaggccacaatgccgacacgtttcccagttccttgaacatggaccccaagtaagcttctgttctccaaatgacctgctgactctctacgcggtcatggcgcgttggatccaagctcaaaaagaagaggcgctaagaattctttattttttttgccaggcccgactcctcaaaacctccgaggattgattggggaagttccatgtggtcatggaattcccccgatatttctcccaccgagcaacgcaaacccgctggctttagcaatcaccgcgaggctttgataattccaaacaaccgagataacccgtctcaatcatctgtctcgagtccccgacctccgccccttcgctcatctcgcgccgactccgacgagatcgagtcaattgccccgtggtccacagtccccagcagtagtcagcccgatgctagcggtactttctatcatgattactctgaacatgaagcttcgcctgcgtcaaccacatttcgtcctgcgaccggacgcacaattgcgagcgaacccgctgagtttgaatcccatggggaacatcgccggccatctgctgcaagtgcaaccacggtcagtagccagggctctagatctagtattagtcaaaaattccgaaagaagcatttgaaaggcttacttggagatgactatcatgcgcctggggaggatgacgatggctcccagaacccaccaagcaggcgtgggggaccagtcgaccagttgaaggcgcgagagagggcgaactcagatggctcacgcaatacacccgaggggtccaacgcctcgcaacgttcccaaaagtcacgggcaaataacccgttgccctccagtgacatcactccatgggattatcagagctttaatgacatcccgcagtatggggaggcaccagtgcgccatgtacccatcggccccggtggtcagcgtcttccaacctcggaaagcggtccttcggggcagagggacccaagcagacggggacctggcaggcatcgttcctcacgaagcaaagaagagaaccccacccttgctggcgatctagcatggtcccaaccccgacctgctactggcagagacgacgttggaccgcggccgtttaatgaaaactacctgcattcagcgactgacatgaacgactccactgcgtttgggggcaggtcggcaagtccaacacccagtgtgcgtagcgcataccgagaccccgatcagaactcacagcatcccagactcggcgggttcatcaaaaagatcctcgggaagtcgcatgacaaatcaaggaactcttctcccccacgacgtgataggcaaggaagcctcgaaggaagtacttcctctcgatacgcagagtcagtagattcggatcgaaagaaagataccgggaagggtttgatggtgggaagaaagcttggtaatcgtcgtgtgttcactcaccaaggtggtggtggtgacctttataaccccaacaaggacgagaaaactcaagaggagaacaagcatttcttccaccttgatgtcgatatggaaaatctgaaagggattgtccgtccaccctcgcccgggcaaacgaagcgtggaagggatggggcaatcacgcccggcgacgaatctaaattcgaaaagccgtggaatgcgcctgaaagttggcaggtcagggggcccattgaccctaccttggaagatcctacctcggaagaacccacccgcgtcggtcctcgtgatcgtgagacttcgtactttattcgaatcttccgaattgattctacctttgccacgctatcggctggtccgaatgctacggtgtccgaaatcctcttgatgcttggtcgaaagtctttcttgcaagatcatctcaacaattatgaaattgttttgcgaaaacatgatctttcgcggcaacttgaccacaatgagcgacctattcaaatgcaaaagcggctgctagaacaagtcggctatacgcaaaaggaccgcatcggagacattggccgcgaggatcacagttatctctgtcggttcatcttcttgccgacaaagcttagcggttacagcagtctcgatagtgaaccaggtttcaacaaagtccaaaaattcagccatgtggatctccaaggccgcagtcttgtcactattccaatcacgctctacgcaaaatcctccgagatcatctcactgaacttgtcgcggaatttgtcattagacgttcccagagactttattcaaagctgtatcaatctgcgagagatcaagttcatcgggaatgaggctgcgttcctcccacacagctttggattagccagccgattgacctatctagatgtgtcaaacaactgcctcgaagacttggatcatgcgggtctcgagcgactgactggtcttgttagcatcaaaatggcgaacaatcagttaaccaagcttcccagctctttcggcaatttccaaaacctacgaagcctgaacatgtcgtcaaatagtttcaaggtcttccctgaattcctttgcaacctcaagagtctggttgatctggatatcagcttcaatggaatagaagaacttcccaatattggccgcttgacctctctcgaacgcctttggatgacaaacaacaacttgagcgggcctctcgatgattccttcggggaattagtgaacctcaaggagtttgatggacgcttcaatgctatcaccaatattgatgctctctctagccttccacgactagagcagatattctttggtcacaatcttgtatcgcgtttcaaaggttccttcccgaggttgcgaagtctatatctggatcactgccctatgacgcaatttgatgttgacgcccctatgccaaccttgacctctctaaacctcgcctctggcaagctctcccaattcagagatacaattttcaagaattgtccgaatataacgaagctcgtcctcgacaaaaatcatatttcctcggtttcgcctcagatcggcaagttgcgtcgactcgaacgcttcagcatgatcaagaaccccctatcatctttgcctccgactatgggttgccttgcagagctcaagcatctcaatctgagggagtgcaatttgaattctctaccagccgaaatttggcattgtgccaagctggaaatactcaacatctcctccaacattctgtcgtcctttccaaaatgcggtgctccgtaccctcaaattcccggtgaacctgcaagcacacctgggactacaccaggcatcgctgaaaaccccagctatgaagatgtaggtccactggatgaacaaaatctacgtcgacccagtcaaacgtccaatggtggtctgaatcttgtgtcaccgaacgggcatcggaatccttcaactgcccaatccactaggaaggtatcgggggcatcaccatcatacaccgaccccaactcggggcatcggaaggactcaaacttctctcagcaaatggcaatgacgtttgcggcgtcccttcgaacactttcacttgccgacaacagacttgaagatgatgttttccgggaactatccttgctcccagagctgcgtattgtcaacctttcctacaatgacctgacggaactaccgcaaggaattctcaaaaggtggccattgatttcagagctgtacctgtccggtaacgagttgacctccctcccatccgatgacctagaagagggaagcaacctcaaggttcttcatatcaacgcaaaccggttccaagtcctgcctgcagagctttgcaaagtcagcaagctttctactctggatgtggggagcaatggactcaaatacaacgtgtcaaactggccttatgattggaattggaactggaaccgtaatctcaagtatctgaatttctcaggcaacaagcgtctagaaatcaagccaaatatcgcctccctgggtcctccggccgccaatggtgccgacctgactgatttcaactccctgactcacctccgtgttttgggactaatggatgtcacactcaccattcccacaatcccagaggagactgaagatcgccgtgtgcgtacatctgcctcattggctggcactctcgcctacggtatggccgactctcttggcaagaccgagcatctatctattattgatatgattgtcccacggttgaagcaggataatgtggaaacactcctgggaatgtttgacggacagacactttccagtggtggttctcgcgtcgcaaagtacttgcacgaaaatttcacatctactttctcgtatgagcttaagaagctgcagcgagatcacggcgaaacaccagtagatgctctccgacgagcattcttggcattgaacaagaatatggcaggctctgcctacagatccattgatgaccgtgagatccggcagtaccatcgaggatcgactgcggccaaactgctcaatcaggacgacattcagtcctggggtgtcgctactgtcttgtatctgaacaacatggacttgtacgccgctaatgtcggtgatgctcaggctattttgatccgttcagatggttcaatgctttccttgacgcaaaaccatgatcccgcggaacctaacgagcgtgcacgcattcgtgcagcgggaggtttcgtgtctcgcaccggaaagctgaatgacgtactcaccgtatcgaggtgcttcggccacttccctatgatgcctgctgtcattgccgcccctgccacaatgcatgtcaccttgacggaacaagatgagatgatcgtgttggcatcaaaggaactctgggattatgtcactccggaagtggtgattgacattactaggagagaacagccagatttgatgtttgcagctcaaaagttacgtgatttggccatctcattcggtgccaccaacaagctgatggtaatgattcttggcgttggggaaattcaaaggcgacgcccaaagcctcgtccttctcttagcactgcctcgtccacgtttgctgaggagcagatcatcccaactgccaagcgtcccaagaagcgcgatggtcctggagattcgcgactcgcgcgcttcgaacatgtgaatgctcccgagggtgaattgactatcatgttcactgatatcaagaaatctacgggtctatgggaagtttgtccggatgcgatgcgctctgctattcaaatccacaatgacatcctgcgccggcaacttgcgatcttcggtggctacgaggtcaagactgaaggcgatgctttcatggtggcattctcaaccacgacggctgccttgctgtggtgcttcaactgtcaaaaccagcttcttgaggctgagtggcctacagagattctcgatcagccccagtgccgagttgtggtcgacatggacaataatgttattttccgtggcctgtctgtccgcatgggtggccattggggcgagcctgtgtgcgcgaaagatccggtcaccagtcgaatggactacttcggtccaatggtgaatcgtgcttcgcgaatctctggcgtcgcggatggaggacaaattttcgtttcctccgatttcatgaccgacatccaccgcagcctcgagattttcgcggatgctgagcgttctgcatccactagctcgaccgacagtaatcaacggggcgatagtctcggccacaacattcgtcgtgaactgcaacagctcaacagtcaaggtttcgttatcaaagatcaaggtgaaagaaagctgaagggtctggaaaatccggaacccctctaccttgtttacccctcctcgctttctggtcgcatgatcacttcggaagaatcacaggatcgtgatagcgccgttgcaactatcagcccagataaccaacttgacatccagacaaacgtcatttggcgtctctgggaagtcacactccgtctcgaacgcctttgcggtgctatggagcatccaagtgaaccaagcttcagagagccgaacgtcgctctgttcaacatgatcaagaggcacggaggtgagctgaacgactcgaccgttctcagtttggtcgaccaacaagtcacccgcatcgaggttagtatcacacaggctcccctttcgttctacttccaatcctgacaaattccaggtatgcatcaatacactctccatacgccatatgatgcgtcccttcaagccaggcgataccctcagcgatcacgccgtacccattagcgaggtactacagcaattacaaacacaacttgctgaattccaagctctcaaggagcagatggccgttggtgctgcaggcaacatcggcggtccaccatctcgtgatatgatgggtcattcagggagtatcgacagtggtattacctccgcgtcgtcatcttccctcaatctcaacagtgatctcaatcgctcttttgattctgggcgcggctaccattgatttctgccacctgctctatagcactaatttcaatcccactttggttggctttcacttccttcttagcttttcttctccttgattgtatctctttggctttattttggcgggcggcgtcccactggcgggagggtggtctgcagattgttttgtataaagcattatggcatggagccaaggtgattgttttgaaaaactgcttccgttattggctttgatctactttcagtttttgggctgtaattggctctgacagtggatatatattacagtctatgtgatactttcatgggcttttttcatatcattttgtttgatcttcacaaaaatagtcggctgcttattcggtatctgcccttgaaaatgcaggcctatagatctgcttcatttggctaataagggatgttgaatgtgacaacatactgacgttttttttgatgtctttttagatgtttatgggggagtgttctatgtataaccagggactatgtctggaattttcctcccatggacacctattaggttcgaggtatatgactttatcgcaaggactttgcgatatattattacaaagcctttttttacgatcacgatgaatccagaatataggtcgactttgactggactcgagcgcagtctttgatcttaattccttgctttgtggtttagtacacgcatattcattatattcattataatagcgctcgaagccctactgacgattctttgatatcaaatgccaagatcacagttgctggcctgaggcgccaacgtcatttttgaaaggtcacgtgccactgtttatgcgtgcgtcatcgacgctgttttctttatttcttggtctgctcacctcttcgtctggtaaacccactgcaaagcaaaaaaaagaagtgacatatgtttcttgagcttcttaactacccacatttacatcttcgaagtcgttagccacaaggtcggcttttcctgccccgcctgttgccctggctacgaactgaacgaataatctggcgtaattaacggcccaacacaaaaacaacacctctcctaccccagtaaaaattcgaaaaagggagcgatcgctggaagctcacttgcatattgcaatctcgcctagctacgcaccgtgctgcaagtttggtatccatcttacgaaaggcccctacgccatctcggtcggcgtcttctaatcaggccgcaacgtcgcacattgcacgccacacgaaatggcggatgaactggaatatctccatccagatttcgatctgaactctctcaccgtgcctcgtctccgctcgatccttgtcaaccacgatgttccctaccctgcctctgcaaagaaggctcaactgatcggcatcctcgaagatgaagttcttccgcaagccagaaaactcttgcgtgaccgcgacagggttcgacggaccagtgcaggtattacagatatgggcagtcggtctacatcggtggcaagcgacgtgaacgacagagagtcgatgcctcctccacccacaccctcaacagtcggatccacaagcagaagcatgcgaggcacatcgcgtcgcagcacccgtcactcaacggtagatacagatgatggtctggaacctgccacacctataaggaacacaaaacgcacgagcgtcgctcgctcggtgggtaaacacgctcgcacatctgacacggaaaccggcgacgacacactcgcgactccaatcgctgctacccgtcctacgcctcgcaagtctacagctagaaaaatcggacggagcgagatcctcccttcgacagaactggatgaacacactcgtattaagtcagaaccacgcaatgagagcatgtttacggatgataatccctttcaaagtggaagccctgaggcccctaaaagcgcaaggatgagttatgatggcaagcggaagagcgtttcgcgcttatctacagacagtccagctcggggtcgcggactcaggtcgcggaaatcagcaaccccgtccaacgttcagcaagacgatggcttccagccaccgaagcgggattcgtttgatttcgcctcccggctgatgcctccacaggaggaacctgaggaggaatcggatgaatccgaggatgatgaagggagcgaaattggcgcaggtgaagaattcacacctgaggaacagctcgctatgtctatggaggatgaccagtactcgccacaaattcaggctagacgacggccccaaaagcaaagcactctcagccgcttggcaccttgggtagtcatcctgtcactggtcggtagttttggtacctggtggcgcaaagaaaaactcgagattggatattgcggcctaggaaagcccacctggtctttggcagacactaaagttcctgaatgggcgaatgtgctggagccccggtgcgagccgtgcccaagccacgccttctgctacccagactttgtagtccgctgcgaaaatgatttcctgttgaagccgcatcctctcgccctcggaggcctagtgccgttgccgccaacatgtgaacctgatagtgaaaaggaacgccgcgtgaaggccgttgctgataaagctgttgaggagcttcgtgagcgccgggcaaagtgggaatgcggtcagctaaaggaagacgggaagggcgccagatctccagacatcagcgagccagagttgagggaagaggtggctaagaaacgccgcaagggtatgagtgacacggaatttgatgagctgtggaagggcgccattggggagatccttgaaaaagatgaagttattagcaagaccaagcagtaagtttcctttgccctaggatggattctcgtgtctccttggctatgctcgaggctctggatttcgacatccagccgcatttcttataaagatctggtctgaccttgtgtaccggaactgacagaggcgcgttcgcaatcacagaaattccgccatcctcatcctctcctctacctccattgcacggctcccactcgcatgcgccgtccgccgctacttccgactcactctcctcgcgtatcgactccctatttcacttttaatcatgaccatcggtcttcttgtgtacgctcgtgctcgtgtcctcgcacgtcggtctgacattgctcgcgtgcccgaattggtagctacaaccctcgaccgactatccacgcaggctgcactatacgcccgcggtgatgccaaagaacctcatattgccatcgggcagctccgcgatgacgttctccgctttgaactccagggcaagcgtcgcgaggagctctggcgacgggtccgcagctttgtcgaaggcaacgccaacgtccgcgcttctgtgcgtgaaggacgtagcggtgatgtttctcgggtctgggagtggatcggtgggattaacgctgtcggcgagccggaacatattggccgccgtgagagtgcacgattctccgtcccttctccatccggtaatattgtgacaagccctcagacgcctgcgagtgaaagccagcccgagcctatttctagcccaagagagtctcgccgctgggacgagagccgtccgatctattgattcttgtcctgatgtctagaggatgatttggacacgcagctccactgtgctattctttttgatatcccaccgttttttcttttctcatatgagatatggcttttgtttcccgggttttcttgtcctgattacaaattttattcccaacttccttcacctgctttatcagaacatattcttttcctgtccatacgaatttcattatcaattccaatcagaactttaattttctcagagacagtcttcgtcctagcgctattgcatgatattaaaacaacggctgcaattcctacggatttggcggtgttagcgtcaagtcgaaccctccattgcatatcagcagcacaactatataactgctatcacaccgatgaaacccaagggcgtaatctagggaaacctacagagtacatattcctaccaatgagtatagtactccgtatcattaaaagacctatgtatcagctgttccagcccaaccgcgaacaataagacccacattatattgctatactatactacccccatgcggggggtcgacggacaccacggcctaacggaaactcttgcttagtgtcaatcttaaagatagatctatatgtaggcggacgtgggtttcttttccgtgttcgcgcattaaattactcaaattagcgcgatcttcttctaattttatgcttagtagagagtaatttatagattactctgaatcatagtttacttacaataccatcttctgtatctggggtttttttagacgtgttcatgggtagaagaatggaggggtacaagattgacatctagaatttccgttaggccggtaacctgcaggggttggggttggcaaccttggaaggaccgggtagtgttcatgtacaatgtcgatcagttaacaagccaagtgaacagaacagaacaggccctggtatgtaaactcgttctatggggtatcgtgtgaccagtacgaatgagtgcctagacgcactctacggcgtatgcagataagaatatttaatgtactattttacccttggcattcttatgacccagccaggcacatctatagttagccccccatgtgcatgttcgacgtgaatctggatttcggtaaaaagggtaaagcgtgttcgctctcgctcttgaccgtctccatccttgatgcccaacgtatcgagctgatcaatcaatatccctgctagtttggtatttgctggcgtcaacgttctgcgtcagttctgcgttaacgtcctgacccagattgagtgaggggaaattggatcgtgtgtggggtttgtgttgagaatgttctgtgctttcattcgtttttgggtctataagagtgctggtattggtagaaagtagggccatcaaggcggggtcgtttggcctcagcatccaatgagatgcaggagtgacgttcgaggctattgcaagccgcgcgagtcgcgtatatcaaaagtgccggaatttggaataggaccagggaaaccaatctaggggagttgatatattagctgcttcgcttactagtggctactaccgcaggacttcaaaggattcatctgcaggtggctgatactcgcttcaaacatcgcttggcagatagctattgcattgcagcaaacaccaggtaatcaggaagagaggagctagtgatacgtgcatgcataggtggtactgtaaaaggagttccttcctacccgcccagccaaccagctctcatgtttgctcgggagaaaagggttctgtacagtagtgagacgagggatgccttttgtgtgcctggtgtacacactaccgtttggaagagaatatagccctacataagaggactcttgtggcgaataatcccagggttgaccgcttcttgagggtcatccaagggaagcatcctatcaagaagggctgggggtaatgaggtggatacgggcattatccgtacggagaacaccttgctccgttgtcttgaattttccttttttttttcctttttcacgaaattgcgatttcatctcgggccccgctctcctttaaaaccgagatacagtaactatagtaagtacgtatggtgtggacgactgcttcctccagggcaactcgggaagctcgggaggctttattctttatatggccgtaggtaatatggagtaagcaggattacatatagcatattcgaatggtttggacttgtaccggataggggccacgtagcgttgtggcaagatggatgaacggacataagaactgtgcgtataagcacagggctcggatagtggagatattggttaatagaggatggagaatagtatgtaactatgtattgatatggggtaagatttcagatattgcggatatgcggctagcagacggagtagttccggtgttcacctcgcttaagttatattgagtaagccccccgagtatatgcgagattggatggctagggataaggattgcgatggtttagcttgccgacgcagactcttcactcagtatgtgagccatggttgaatttggcaaaagcaagagttgcgaatgccttcttcttagaagctttcaaggtttttcttcggtaaaagcaaacgaatcatgtctggtacggaagtattctccccggggaattatcggatgtgaagggaacagccatgcctaggtctacgggggacggattttggtttcattttgtcttttacctttttttctccaaaaaaaaaaaaaccaaaaaaaagaacaaaagatgttaaagttcaaagaccacgtcgtagtgaaaatcgatgtgaagtctacatagtcaggaacaagatgatgatatcgaaatcgcccctccccatgatgaaccatgggactcgttggttccagacaagattgtggacctgtcaaacttataccagaaggctatgcatggtccgtattggacttgccttgtcccatttcattttgatatatccacaggttttaacatccatggatatagatacagcatacaatcggcagggtacgatttaccgtgcatatactccatatttgggacaaatttgaaccatgtgaatgggataagcaagggacatgtaactacataactagaatctgctaatataagtgccgtaggagcctcccagagcccagagcccagagcccagagcacggagaccagagcacagagccccgtcgtgaataccccacatatatatagtgttattcgtttcgtcagccgagggtccaatatcgagctactttgtatcgagggtgatcccgaaagatgttcccgttctcgttgattgatagtctacctaggccgacgaggtaattccggaatgggataacaaggaggacagaaagctagaaatcaagtgactttccagagtaaaagatcactggttcagcaactcgtctgtctttggttcacatgtggcaaaacacccgtggtggaggggttgacaacgtttcgcttggtggggtttacacatcgtctactgcatacagtatgtaactaacgtacgtgggcccgtgttgggtggaatttctcgtcgaatgggaatgtttcaagagatttagtatctgcatcccccgtatggatatgtatacacactagatcggcgtgcagaggagactggagcatttctcggagccttgcgcatgacactgcacatgagcataattagattagtgagagaaagagaatttctggtaaaagaaaaccagcatcagactctagatcttccgatcgacaaagtaaaccgagaaggtcagggatcgactgaacggcatagacccgctttttccaatcgacatagaaaggggaacctgggaaaagacgagtagaggaaccgaacggatgtcacgttaataataacgttgttacagaaactcacctgggtgatagggtcatgatttcatattgggagagtcgggttggttgagcctatcatttaccccggaaaataactccggggtcgagaaattagggttatggataggagcagtcggatataagcatatgaaggaactcaacgtaaaagatattgtcagaaagggtacaaggtgcattgtataatatccacgttgtatagacacgatatacggactcattcgtctgttgtttcgtacttcgtacctggctaataactccggtaattagcttcattctcaccattgacagcgagtagaaacggtactgagctgttggtataatttgtatttgactcttgacctttgatatccttcgatcaaccagtattttcttccttggaggctctccagctcccatcacttgcttattgtctggatatgcctggaggcccacatccgccaccgtcgaatctctcccttttccctgtttttttttcgtgatttttttctaattttgcgcatttctggacctgtttacctgttatttacatgttattttccgaatttcctattatttcccatttttccctccttaatatctcccatttcccccccacttcgctctcatctaggcaccgcacagtgcagaattcaactgcataggtctagcgcggccccagggcccctcctctctttctccattctataactctctctatgatctgtccgttttccccacgtgatttgctcgattatcatgctttgaaatgagtggttggaagacagagagttgggcttttgatttgctatttctccctttgcttttgtttgcgggcagacttgatgaatgaacagacactccgaggctataggcctcttgcgcctcgcaccaggctactcggtggatccggaggggacggcggagagggagggagtccttctggcgggggtgcaccagaagagaaacgcatgagacgagcctcgacggcttgtacagagtgccagaagcgccgaactagggtacacatctcactgcgcttcctattttccctatctctccccttgctcgcacctaatcagtactccaaatcaatctgacatgttcttgttgctatttttgttagtgtaccggtcctcccaattgcaccgaatgctcaacccacgcccgcgaatgtgtcttcgatgaagccgccgacaggcgtcgcaaggcctccgccaagcgaattcaggatcaattggaccatttccggtcattcgtggacgatctcatcgggctcatccgcgatagtgacggtccgtcggtacaattaatcgtcaataccatacgatcgggtgcaacccctggagagatccgagatatcctcacccgtctgttggacgacgataaccaatccgattcccgaaattcaggcatgcgcgactcggacgtgaacctgaactttaccaacaatcacatgggcaattacttccacccgccacgctgaattaccctaatcttctcctccggcaacatacgaacctttccaatatgcgccagacttaccgccgcctcctccccgaattctttacgccaaatcttctcgatcccaaatcctcaaacgaccaaacgaacctggttgtttcatagcgtttccttcatagctgttgttcgtatcgggtttgagatggagcaggtcattcaaaaaactgtcacattcataattcaggctgtgtgaccagctccatctctatggttgctatatctcgagacagattgagatctcgcaaaaaaaaaccagactgttcctgttctctcacccgagccctagcattacatttttctttttgttgcaaatattctttgcgcatcccagaatcaggggctttagaagcttgcaagattgcggagggtcttttgacagaagtgaatatacccagagatacccagttctagcttgtcacgttcggactttgttgttggagttacacgtcggggtgttatggggttcggagcaagtgtgattttcctttttatattgagcccctggcggatattcttccaacagcaaccatactgcaatgaatatctttcctagcctagggctttatccgcgtttctttgagagatgtgacccaagttcattttggtcactgaaatcatattatgtacccctcccctttgggtttgcgcaccagttgtcctctcgcgcagatcgaggctgctctctgttcatgttagcaaattgcactccaagatgatattggattcccgtaatcacacttggagggtccatgggtgatatgggcagctgatcacactattatattgttgaacatgttctgaagactcctatcaaccccacggacatgatgccagtcttctccaaccagcggacatggtacatgaaccctacggtaaaactgcttaccaagggctcatatagaagtattactctaacttagctacagggagcagagcacccacttcgtaagacgatatctatacgattttgacaagtgaacagccccttacctgaaagcccgatcagatatgatcttccttaatctttcttaataaccgtacctcacgtagattaacccatatccacacctatacttcaaatgcctcataggtacatagtaaaaatccggggaggtggaggcatccccgcgccgaccggagacttgccgagatcctgtgcttttcccaaactcccaatttccccctctccggatatttctcctttctcactacctcgaagtcatctccatctgacattcctcgggacttaatcccctggctcggcctgtgccgatctcgatatggaaaccactagcgttgccttgcacgaatctccccggcccgcagtcaaacccaatgaaataacttcaacattgcccgcgtctaagaggaaagcatctgacacattaaaggatggtgttgcacagcgccagaaaatcaccagagcctgtgactggtgcaaagtaaagaaaacccgatgtactggtactctgccatgcacaagatgtacacgactgtcaatggaatgcaaatacaacgccgcatattctcggggactaccaccagaccctcttcctgtgtcaccgggtccaatttcgactcccactagaaatccggcatttgaagctgtggatgggcgcatatccagcttcaatttacagggcactggccgggacccggctttgaccaacaatctactttcaaaccaaagccaaagccagcgccagcatgtgatctcaccgcggcattcaccagaaccaggttcaacggattttgagggtaattacctcggtccttcatccggtgtgtcgttcttaaatcgcgtatggagccgtctgcatcaagatgaaaccgcgaacttcccagataaactccaaattgagtcctcgcggaatacagccgtctttatgtttggtgataagccttactccaaccctcaagacgcggaatttaccctcccgactctggaaaaggccctggagttggtgggaatatacttcgattactctatggtgacttatcgattcgtgcatagaggtaatgtagaagaatggactagacaggtttatcaaaataacatcggcctctcgaatctgccggtgggaaatatggttgctcggactgctatcgttctgatgatcattgctgtgagtactttgtacatggaaatgaggcccggggaaatgcctggggggccaggtgaaagattagaaaggtcagtaatctcttgatatcagaaaaggagcccagctgagaaattgcagtgagcgctggtacgcagcatcgaaatatatgtcttctctcgagtcagggccgccgcgactggaaaccatccaggcccggctaggccaatgcctatacctgctgtcatcgtcacgggctaacgaatgctggtactcattcggaacgacaatgcagattgtgactgcactcggattacacaggagggggccagccaaagtctcgaataacgggtgctcgtatctagaattggagcttcgcaagcgcatcttctggagtgtatacactctagataaatatctaagcattatgttcggaaggcctcgactgctccacgatgaggacatcgaccaagaactaccgaacgagacgaacgacatagacttactggaagaagacccaacgcgaagaacaggatctacggacagcatgatgattgcctctgttcttcattaccggtgagtccctcacctagcctgtacgtatacctgagcactaacatcgaacacagacttggtcgtatcctgggcgacatatctcgccaactatacagcataaacaccctctctcgcgactccccactcgagacagcaatccgcctaacctcagaactcgaaaaatggaaagaaacagtcccaccattgttcaacagcgtccacccgaccagtttaattccacccctctgccgccaaagccaagtcctccaactcgcctactcgcacgccatgatccacgtcacccgctcatttctcttaaacgatttcacagacctcagccgcagaccgaaagtcccgcacccgatggtcagctcgcacgtccataaatgcatccaggctgccgaggacatcatgacaatagtcgatggtcttgcgcaccagggtgtactgatccagtccttctggttcacacactacgtgtgtttctgtgctgttctggtcatttacatccataccatccaacagcaccgtaagtcaatgggcggatctagctcagcctctgtctcttcggtcggaagtccccgtgacccagataaattacgccagctcttttctctcgctgaatcttgtcagcaacatcttgccgaggccacgcgcaagaactgtccgagccgtcgctacgggattatcctggaggagttgagacaggaggttcatcggcagatatctaatgggctctcggttgaaactcaggctcattctggtgcaaatgttactctctatgtttcgggagagggttcacagaatacggatgtaaaatcggtactctttgatactcagggggttgatttcatgatgcaaccacccgatttgggaacgaatccgggtgatgatgcaggcttccttgagagccttgagggatcaatctggtgggctcaacttgactcatgggtatgtattatgcttttcttgacgatacgagtacggaatatcactcgcctatacacatcttgtttaactttgttctaggccttgtccaatctccctaatgatccctcgacatttagcttttaagcactggatcctacgagtcacaaagcaaaatcgcgttcaatttcagatatcctgctacagttcgtatcacattctggacattattccgtcaagacgctatccggtgtggcgctcaatactgcatgagaccaccgcggtgaatgttctccaagtagtcatcgaatttcgccgacacctcaatcacattcttgaggtgatcatacgtgagaacttcccttttccacttcgcgtactgacgagcagtggtgacggcattccgaatttgccgaccattcaacttctccttctgaagcacatccaagctccccataagattttcaacatcaacggcatcgttatcgaactcatcaaggcgcttgatgaaagtattccaaatgatccgtctctgttcctcacccagggggggatagtgcagtgccagctggatgcgcgacttgaatgcctcgtcaaaggtacctacccggttggtggtcaagatcaggattccatcgaaatactccaccacgcgcaggaatgccgacacgagcgcattccggttcagatcttccagaccgcgttgctcgagaaacacgtctgcttcatcgagcaagactacgcagttccaggtcttgcccaggtgtagcacggactcgaggtacttctccacctcctctggcttgatgccgacatcgccgcatgtgactcgatacagaggccgctcggctatttcggccacactctccgcagtcagggttttgcctgtacctgggccaccgtgcagaagcaaaataagcccgtttccttttccagcgatcagatcggcggagtattcaggctcgacgtggttggtcaccaatgcttcgataaggtctctcgatttggaatcgatggctagactctcgaaagcgtttttattccactcgacaggtgagatgcggtcgactgagagctcgaaccatttcttgcgccggaggttgaagccagttatcctcggaggcatcatcatgctgaacggctcttgcgggggttgctccctggccatgactcggtcatcaagtgtctttctaggtgagctgttattcaaatacccggtcgaggctgggtgcagtctgttgtatgtcttcatatctatgatgtatcggtcatcggtctagtagcaatatttagctcggctcattattgcaggttaaacaataaacacataccatggtctggaagttctcttcctcggtcgcctgatatgacacgtacttctgcgtgcggaatgtccagaagatctccccacggcgctgaagcttccggacgatataatcaggcgcatacctgattgggaataccgcaagatccgtgatagcacactctttttctgagtcactgtggtgtagtggaaggctataatcacgcaacgaatcacccacttcaggcgacgatggcatctgcgtggcgtgctgtggctttgggatttcaaaactgagcttagtccgagttttatagaagtcgccatcgaagtcccaggtctggacactgatccaccaacaaggattgctgccatggatgtctgggcttctagagggccatccattggctacataacctatgtgctccttgtttttgtccgaaaccaggacttcattgggcttgaatagatattgaacgtactccgggcggattttgcccttcttcaaaagcaaatccactgcagtgtattcattgccgtaagcctcttggacatagtctatgaagaggtcaaattgtctctgtgcctcagagctcagccctcgtttgatttccgattgtccagtaccccggttatggtagacgaagagataaggcgacctgacctcacccgtgtggtggtagtcgttgtacatggctcgaaactcttcgcccccgaggaagtctgcgatcacgtctttgagaccttcggaaactggaagaatggtctcgctgaatggctctggcttgccgtactttgtgttgggtgactgcggctcggctcttcttttgtagttgcggaagacaacaaaagatatctctctattgagcgcgaggtaaagctcgaaattgaccagagggtcattgcagcgcagatatggcgcacccatgtttcggtggatgagttcaggaggatcggtataaatccccatccatggagacgcgggtgtagacccgcgcggcctgtgtctggggctgaattcatcgtcactatcgtccatgctctgattgtcactcggataggtgccgtctttctctatccgataaaggatctgatactttgaggctgtgggcagggcaggttttccttccagctctcggactttgtttcgaagcgcttcgatttgagccttgaggtcattcgcctctgacagagagacgcttccttggctgggaggagtatatgtctctgagcgaacggtgtttgagtactgcgggttcgtatcatacgaattcacagactgtggactcagaatctgttgccttgcaggagggtaaagggcgttggtatggtgaaccgggacttgagggtattgataaggcataggacccgggggaaaatggccttgcattttttgattgttgactacctgcccgaaaggatggacaggattattatgctcgactggccaatggcggaacgtagtcgcgttgtttcgtcgtgcgacgttctcccgttctaacagcatcagtttgaatgagtaatcttggttgtttttattttcttgcatcgttctgggattcggaatataagatgtaccatcaaggaaaggaggagctcttcctccgagggaagcatggaccgattgctcttgtgaggcgtctttaccggtcaaatcttgggagatggtgctttccatgtacagctcatcaagaggccgagctagaaatgattgagagtacattgcccagagatgacaaggatcgtttcaggacaaatcaaatggactgtttcactgtccagagggagtgggaaacagacaataaataggtgaaattggggggatacgaggagattttgatcccaaccgccccgcgtcttgagcctctggactgtcatgtgctgtggctgtgtatatgtgcatgttcttgttgttgggctggtatattttcatgtacaggtacctaactcttggatgttagtgtcttgtatatctccatgtttgtttcatcaagacgttgggtggcgcttaccctctttcgtagttgccagccctaataacatgggttcctactacagacaccggagctttatgcttcacattccatgattgatgcttcatacatctgattcaatatattgttaaagcctacgcatgtttcattcaacgctcattggctctggaaggcaaatatgacagcctccagtgagaaagatccagcccgacgaagtcttttcaatctcttgatcccaactaaagttgtcgtctctggaaagccagatacatctccaaccgattctgcggcaacggaaagcccagcatcggagccaattatcccaagggggggaaaagatcggctaagggctcgtttgactcgcagtggctccaagattctactgttgctaggcttacgtggttcatcccaaagtgagtgatggtgtctttcttgttatagcagaccattcactgactctccgcaggcaacaaagggtctagcgtcgacactgattgctgtgattcggtgcaggccgacgaaagcacaggtctctcgaacccatcctccccatgtggtaatggcgataatcgcccggcatatctgactgcagctgagtctgtacaaagtgaactattacctgccactcttttgcgcagcacccccacccagggggtggaaactttgtctgagccacttcccgacctacggccacccgagagtcagggtgagtcggctgttgtcgacgacgtgcagcaacatagctcaagtggggaacccctgtcaactagtgtcactgaacagccgagtccaacaaattctaaattcgtcgatcgcttctcgcacaagatctcgctagcgtttggtcagcccactgtcatccgccgtgtgcatcttcggtcacgaccgagtgttcttcccgccaattctccggtattagacggtctctgtaagcagagtgatggagctaatgatagctccggcccatcaaccagccccagtagtggtgggtctcctgccggcgggcagtcaacttcactgactccgctcacgtccgtggggccgtctccttcctcggataaaggcaagctgcccgacggacacgaaactgcagtgatacattggccctctcttaccgagatcaatgaagctgccaacgcttcagacaaaaatgtaatcacaatatcgccgtcgatcaaaactgtggaagcgacatcagtggcaaaagtttacttggaactatacttcaactccatttttcaaaacaaagatccccgtcagcaacgtcagctcgagttggagcagcatatctatgcgtttgagctcacacccgaggaacggctgatgacaagacacaactgggtcttacgagagaacgattatcttcgacaatgccgtgtgctcaaatcaaaccgatactgcactcaaaccgaagacgccatctccatcgcaggttacaaagctataaaggtattggggaaaggaagctttggtgttgtgcgtcttgttcgacggaatagctgtgattcaaggagttcccaggaagatgaccctcttactctcaaagacaacaatgtccacgctagatcaaatccttttggagctctgatgtctgccatggaaggtgccagacaaacccgtcgaaggtacatgaccggcgaaaagaaggaggtatatgccatgaaagtcatcaaaaaggccgagatgatccgcaactcccaggaaggccatattcgcgcggaaagagacttccttgttgcatctgagaactctcgctgggttgttcctttaatcgctagctttcaagatgccaccaatctatatcttgtgatggattacatggtgggtggagactttttggggctactgatccgcaaagatacactccgcgaggactggacacgattttatatcgcggagatgatattgtgcattgaggaggcacatcgtctttgctggattcatcgcgatgtcaagcctgataactttctcatctctgcgtccggccatttgaaaatttccgactttggtctcgctttcaatgggcattggtcgcatgaccaagcttattataacagccatcgctactctttgctggagaagcttggcatcgatgtcaagggtgattccgaggaccaagaggcgtctgctgaagcgaaagaactcgctcctgatataaagttgcacattgtggatgaccatgctcttcatcagccatcctcagcaagtttgttggattggagaaacaacaatgggcgacgcagattcgcaagaagtgttgttggaactagtcaatacatggcacccgagctcattcgcggtgaaatgtatgatggacgatgcgattggtggagcttgggtattattctatacgaggtaggtctctcgatattctctttttgtgtgtatgaaagtctcatagctctcccagtgtctatatggtttcacacccttcgcttgtgaaaatcgcaatgatacaaagatcaagatccttgtgagtaccttcttttcccttgctccagtgaacatttcattctaagacttctcagcaacactcgagaactctacgatttccgcgggagaaattcacagacaagttagtctcacaagatgccatggatctgattatcaggatactccaagagcgcgaatatcgcctgtgctctccaaagtaccaagccaatgatatactgaatggacgtcctgtctcgacccaattgctctactccatggacgcgcggtacagaaacatcgcgagttactacgtatatcccaacgatgcagcagacatcaagattcatccattcttccgaggtatccgatggcaagatctccacatgtgtcaaccaccaatgatccctagggtcaggaactgggaggacactagatattttgacgactggaagttggccagcaatggtgtcgaggaagctgttaatagtgactcagaggatccagaccaagaacctcacgcgattactcccgaaaatcaagaaataagaccagcagaggacgctatcgagccgccagctgctaaaactaccccaggtgtagcaaaggaggcaaaagacaccgagaagaaaaaggagaagaaacggccccgcgataaaatcctccgagacaaacagataagcaagacggtcttggacattcggaaaaagggcgcttttctggggtacacataccgacgaccgaacgatgttgcgttggccttcagcacagagcgagggcgtcaaccgtatgccagaggccaattggccgacctgtattcatcatgactatacaaggcaaatacgtggaattgggagttgaggaccaaacatgtcggccattgcattcccattcacacgacccaccaccgtccttttacagggccgaacatatccatataaccttcttttcatcttgtatagcgcctcattccctcataggtgcctgttcggaattacaggacttcactctccctcttatgtatccttaggaataaatatataattacggaaagatgttagcctactacacactagaagtattgtcatcagagtacattctatttcctatgatacttcatggtagataaatgaagtaaaacacccaaaagaaaaagaaaaaacgctgggaaattcgtacacacagcaaggagaaagcggctatgtacggtctcaaatcacatctggtggatagaaaaccggggtatcggagagtaagttcgggacagagaggctttcaaggggtatcaagttcagagtagatggaaatgaagaggggaaatgagtaaggaaatagacgcagaagaggaaaagccaaaacgaaccgagtttacagaaccggcgcgctcatggagaaagccgaatccgtgacacgatcctcgggcttcatagtaccattgagcaatggacagagtttcttgtttgttttgatgtgcccgacctggccgcagttggcacacttgcgctgagtaccagcaggcttgccgtccgggtcaccggaacgagggatgcccttttgcttctcgcgggcgaaacgacgctccttgttgcggttgagacggccgagctcggcctcgatcaacttccggttacgggcgtcgagttctgtatcgcccgtgggttcgagagattccagctttatgtgcatggcttcgtgttggtgacggtattggatatagtgcctgatcactcgaggatcgaaaacatgttgttcctgatgaagaatttcgccgttttcctgtctgatctggcgggtgatacgcagcactttgccgcgctggctgttgaaactcagtttgctgaactgacttgttgtctcatcgtcgcgacgatatggtccaggtgtctgcgcttcagatcgaggtgttggtttgttgaattgatcctggtattcgtcttcttgatccacgtcgctttcctggtcggaatgctcgatggtggaggacagactgcttttttgagcatcccaaatccgacgaatggatgtttcgtaagatttttgctggcgggcaacattgtagctgtgacctccaagctccttaagtcgctgcgcgtccagcttatcctcaacactttcaccgatagccttgaaaccacccttcatgcttgttttgatgaagttataaccctcaccacggccagtaggatctccttcgccatgaagtttcagcatcgccttgccttgagaggccaataaaaagttgcgagttgccttccacggagccatctgctgctcgaagctctcgaattcttcatcttcttcgttatcgccgccggtctcggcatcgttgccataaccagtgtcgtggagatgttgctgtccaatctgcatggattccagaagacaaacatcttcgggctggacccatgagcggattgtgtcttggtcggggagaattggatccagtggcttccaatacttagtgtccttgtcgtgttgaaggaaatccttgaccttctgtcggttctgcatatccgtggtgtttggtatgtgagctgtaacatcgctgattgcaagtcgctcatccgggctcttcttcaacaaacgatataccagcatcttcatgcgattcttggcgacagttgtcaccttgcgcgaatgaggtccaggaatgtctacagatgggaattgctgtccggcaacgtagaaattttcgatgttacgcaggtaatagctagagccatcgaatccagtggtactgcggaccacgaggaagtccgtagatttggtctggtgcgggaatagcggtgctcggtacatggagtttgaaattgccggggaaatttcgccggggtcgacatggccaaagattgagtaggggctcttgtcttgaggtaagagaacaaccgtttccccgatatctgcccttgggcgagtgggatcatcaatattctttcgccggtaataattgatgaaacggttgcacattccaaagttggctagtgtcatgggcagctcctcggagtactccactagcaagacattggagttgtctgacatggacaatgcctttgtggaattatagatagttttcgcatctttgccacgtaagtgcttgcgtcgcacctgggtagggttcttgacccaagacgtttgcccaggtcggaaggccaaagcaggtcggtggaaagatctagcttcagccttggccaactcagtcttgtagtagggccactgcaaacgcagggctggcagaccgtgctcaagtgtcacattgccaagagtactgcggatcttgttctgatgattctgtttgagcatgtcgtatgcttgatcattcgaaatgttgtagcgctgggtgagacggcgcgtcagattcaggtctacttcatccctggtgcgaggagctgcgtgtttcggcttgtttgcgacggcatccgctcttaattcgtccacaagaatgttcggatcattgagatcaattgtcactcgctttgcgattttcattgtcgcttgttctgggtcatccaatagtggaatatcgatatgtgatagagcaatgacatccatcggcgtcgggccggtctttcgtttcttgttcggaacctcggtttccatcagccaatccgcttcatcctcatcaaatgtatcatcttttctttgtgccaatggctgctcttccgggtcaatgctggagacgtcatccttaacatcccagtccacacaaatcgttcgaaggtcctgcatggtgaagccacccggaagtacctcatctccatccagatcatccaggtcaatgtcttccttcgtatcctcatccccctctgctccctcctcttcacggtccgattgtgtaatcatcaccaagccatgagtttcatgatcgaggccacgcttgaggagttgcccggttctgaatgcacgctcatgatcagctgccagctcaatattcactttggtgggcaagacgggcttaggaggcttggccggctgttttccaatgaagatagccttcttgtggggaatcaactcgagccaacgtggaagagtgttccggtcgaacgagggaaacaaggaatgcaaaagctcttcgtggttctcgggtggtgcaggtgggttttcaacccctgacatggcgaacaactgctgctgtagtttccatgcgcggagttcgacgggattcatgtcttccgacatgatactgtcatcatccgggaattcatcttcctccatgataggtggctctggctgcaattccggggccgacgggatgggtggtagttcaacgggcgcatctgtcaagggcatatcttcgtcttcgaagaggccgcgggtaggatcatcctgtccagcaggaggcggcgaaaaagaaccttcgccaaagagatcatcgagattgtcatcctgggtctgaggcccctctcccgggtcgccgaagagatcgtcgccgtttccgaaaagagcagcatcgtctgagcccaagttcgcgaaaggatcttgattatcatccactgtaggcagggctggagctgggtgtgtcgtctcctcttcctccggaagttcatcgtcgtcgaagtcctcgtagtcgattgcatcttcggctttttcaccaacttccagatcacgcgacaagaaatctagagaggggccagtatcttcgtagttgttcagttgtcgcatcacatcgtcgaaatcggtatcatcctcgcccccgggggcctttggtgttgcgtgaggcatgatgggcgagtaggcgtgtgtttaagatgagagaagtgttgtaaatgaaaaaagcgttagattcggcaaggttggtgagagaaatcgtaggttaagaatgtaggcgcgagccggacaaggcgacaacgcgatttaaaatatgcacatctgggtattatgcgagtctgcagtttggatgtcggtgttgccgtggctcagactgcgcaggagagagaagaggaggggcgtgtcggacaggtggtcgtagagggaaaacggcgggtttccaggatactgcgcaagggaccgggtcacgctaacccgataaggcaatcagctcgatgcctgaagtccaatacttgagggctcaatagcatcttttcaacgacaatgaagaacaataggaataaaaattttaatcggagttagaaatacatttgaatttattgtcatgaatagcaaccataagtcatgtcacattgaaatccccatagaaaatacacaacgccttgcttgcaccctccatgcaatagtgcattactgtagccttgttaccgtcaggaaccagttttgcaatttgtgccaaatcagaggtccttggaatgtaaaggaccatgtgcttgctgaatgctgagtattcatcatacaatcgttggagggaatatggctccatggttttcaggttgaatacctgatctgaacgatatcccgggcctgctacaatcagttcatgtcgcagaagtaacgattcggtgacacttacctccccagggagggctggcgaagacgagactgtacggcgccagttctttgagttgattcttgagaatctcgaaacaatcgccttcgaaccaagtgatcttgtcctccaccccatagattttcgcattatgctttgcgcacttcagcacagcggggtttttttcgatcgcgtagattcgtttccattttccggtcaaagcaaatgcgatggtgttacctcctgcgccagcgaaggcgtccacgagaatactgcgcccagcaggcgctgattcggcaatctgcgaagctatagtgctaaacaaatattagcagaaattctggcataatcgaaaagagtcacaaacttggcgactggttctggtgtgacaccaaaccaagcatcatcggtcaaccatacgccatcatcgtacttggaaaagatccgatagcgttgcgcccagtagctgataattaggttagcattggtattttttaatgatgatgacacttacttctggatgtcccagggcacttcatgcaagctgctgtagtgatgcacctctggaggcgcgtcttcatctgccatgatacaatgcagcgataaagcgaaatgatccatcgattctcgataactgataatgggtggtgtttgcatggtttgcacctgcctatctggccagctcgcacgaggtaaacacaccggctacagcttccctattcagcctcattcgatcccctctcacactcttaattctagcaaataattatgttcggcgcattaaatcgcttcatcggccggctagatggggagcctggccaacagcctcgcagcggccccagtgacaacgcattcggtttccaggtcctccgcaacaaagaccgggatctgcctttagagccatggtttgactttatagttggtatcaacggtcatacaattgtaagcatatgggatcattcaactcccggcattatagcttcgctcacactgacaaacaggaagatccggacccaaacctctttgcgacagaatgccgaaattgcgctgggggaagcttgacacttgaagtgtggagtgcgaaggtagggatactaagatgatacttctagattccagctgaatttatatcctaccagggtcaacgaacacacacaatcactcatcctataccgccaacgaacccctcgctcggcctcgcgctacagcttgcccctctctcttccacgcaaaacatctggcatgttattgcaatcccatcgcctctcagtcccgcataccgagccggattgcttccttactcagactatattattggcactcccagcgggacgttaagaggggagtctgcactcggggagttggttgaagaccatttaaaccgcacgctggttctgtgggtttacaacagcgaatttgatgttgttcgtgaggtcgagctcgttcctaccaggggctggggtggcgaaggcgcccttggtgcagagttgggatacggtgctcttcaccgactacccattgggctcggagaagcagttgagggaccgggagaggttgtattcgagacacgcgaggacgccactacttctccagatacatcagctccttcgggtaacttcatagtcccagcaaacatggcagcgccgccgcctctagccttcgctcaagcaagagttgcgtcgccattacagagcagatcgcccgccgggcgtcgtgcagggaaatcacggtccatggcatcgcccaatagagcctttgatgattactttgctgagggtgaagagaaaagtcgggagcaagactatgcgccgtcacggcatggaactcctctacctccgccgccgaaggcaggagtctcaccctctcactcggggagccctgcgccggaaggaggaccaggacctacagaggaagaatgaatgatggcttaagaatccgaaaccaatttaatatggagtatgatgaaatcaaattatgtcgatcgtcgtgaatgcaaatgggttttgcaacattctatatcttaacaggtcagcgagtttgtactttaactttcctataacagatctagccatgatcaatctaagaagcgagtgaagcagaggttcataggtaagctagccgacttagttgaagctgaaatctcaataaccaagggatgcatggtattgatatgcttcttatttggcctggatattgccaacccacaaacacaacactagagaccatcggcggagtactaacgatgtctggagaatgacaacgaccacgcaagataactagactgtattgaccttggacgagccgctctcaacttcaatcttgcagaaccatggatgggataagatttcggcaggtgaaggtcttttcgcgggatcatattgcaaaatccatcgaaggagcgccttcacttcgtgagcttcctcctcatcaagatccgggcatgcccgatcgaatgactcttctatggatggctcctctaaaataagcggttcctttcccggacggacccctccaagctcctcattgaagagcttcctctcaggcgtgaagtagagcgacgatcttgtctaacggctaaagagctcgtctgggagatcgccgagtagtgatgtgatatagtgagttcctttaactagagcgactttagcgatgtggtgtaagattcttagctcggttgtcgatcccgagatttgagacataaggatctttagggcgatatatctactatttcttagaggggatgagtaacgataatctatagtatcgggggtaaagatacacagaatgaacttacttcatgttataggcgagctaaaccgttgagtaggagccctcgctaagcttccggatgaccttgtactgttggttgaagacgtcgccaagaacgactggatgataactacctgggtggtaatcctccacccactcatagagtgatgtaatatctttgaatctccgttcgtcatctattgggccacttgatggcggagtgggaggagaagaggtactcatggctgcgatgtagaatggagaagaccaaactcgagagaaactgagaagacgttcccaaagagcgttggccaaagcctccgtggtacgtttatgctcgtctacatgaacgagtttcggaacttatgaccacacaattcaaacaaaggaatcaatccggttatgtcttcggatctaggagtttctaagcgtacatatgcaacaaataaatccatctatagccccaaacagtcgggctatatttagtggcccttgctcaccagctcttccaacttcttgcgggtgttaccaatcttttcctccatcatctggcgcgccattccgctgtgcgcaattccggtgtaccagatgtgctccgcgcgctcacgagcagccaagtgcttgtccgcaagcgcagggaccttcttctcgtactcccaaaccaaatctccgacattccgcatggtcacgggcaggaggctgtaggcggcagcagtaccgaaagtgagcggcgacgcagtgcgcaggaagatgccacggttacgcgagacgattgagccggccatggcggccacgacgacgtagacaccgccgggcaaaagacgctcgccggactcggcagaaggcgcgagcgaggcaacggtgttggtgaagcagttttcgatgttgagggcccgagacaggaagttgttgaagccctgctctgcggcgagagagtgtgagtagaggaaaaggcgagcttgtcggacctgagcggtcaggatgtctgtcggggtgggcgaagagggagcttgttgcgcagccggcgcagagatcgacttcggggtagcaggcgcagcaggctgcggaagcttggaggtttcaggaatgtcggcgggcaagtcatcgtagatgggtttccgctatattaggaaagcagtcgtgtgtcagaccaagccttttcagacattcaatagagctaggaacagatctggtcatacatagtctcggggctcttctgcgaaagcggtattcttaggatacagagccatacctcccgcgaggagagtggctgcgatcggagccacagcccgctgggaacaagtcagcataggaacggcacattggggatcaattgaatccaacttgaaagaaggcagttatacaagggcatacctgttgcaacatcggccggaatgacatcctgagggtgtggggaagaggagaaggggggcgagctggtagtgaggatgaagcaaagtcgtgttggagcaggacgggaattcttcggctcggcggaacctccagaaaactccgtcattgtccgttctccttgactctagatttctttcggcaggggatttgtgaatctgcaatttccgatggttttcatctgcttttaatacagtctctacaatgcttcgccctttgcgacgaacatggacatgtcgcaaatgcctactgcggccccaatatcgagccttcgagagcgccgcatcttccccgtcaacgtcgttcgagtatattccagtggataacagttcaccaagaaagaagaccgacgaccatactctacggcgagtttttgattcccaaccgttttggaatgaattctcccagcagcgcacgacctccgtcccaaagcgagctggattggtccaaaatcaatacctgacaagtcccgagggctttaggacattcgctaatgtctcgctacaaagatgccaggctattgtagccaaggtgcttgcggcctcgacggttgaagaatacagggcccttgcacgcgaccttgaccagctgagcgatctcctgtgtcgtgtcatcgacttgtccgacttcattcgaaccattcaccccgatccgagaatacaggaagcagccacgcaggcgtgggctcttatgtttgaatatatgaacgttttgaacacaaccacggggcttcatgaccaactcaataaggccttgaacaaccccgacgtgacatcatattggaccgaggcagaacggatcgtggcacagatcctcaacaaggatttctcgaactctgcaattcacatgccgcccaatgtgaggcagcggtttgtaaatctctcaaatgatgtgagccagttgggttccgattttatgaatggggcggagcctgcaagatcccaggtggtctttggtgccaatagcctccaaggcttggatcctatggttgtctccaagctcaagcgatggaataagaaagcgccagttccgactacaggtattgtccctcgactcgttctgcgctcggtacatgatgaagaagttcgcaaagagatgtatatcgcgactcgaacatccagcaagcgccaaattcaaagactggaggaacttttggtgaagagggcagagttggcacaacttacaggctataatagcttcgcgcacatgactctcggcgacaaaatggccaagacgcccgaagcagtatcaaactttttgacttcgcttgtgtcaagcaaccaaggtctagtccgggaagaactatctaagctgcaggccttgaagggagactccgcccttcaaccctgggaccacgcatactacgttcacaagcgcgttttggattattccctagctcgtcgctctcgtcacatgggtgttgtcaacgagttcttttctttggggacagtgatgcaaggtctttctcgactgtttgaccgtttgtatggtgttcgtctagttccccatgaagcatctcccggcgagacttggcatcccgacgtccgtcgattggatgtggtggatgaatcggagaatcacattgcagtcgtctactgcgacctatttacacggccgagcaaacacccgaacccggctcactttactctgcgctgctcgcgcgaaatctctccagaggagatcgccgagtgtgcgtctatgaacgaatctgcgcacccgaacgatggcatggccactggtgtagatccgcagactaacactctgcgccaacttccaaccatcgccctcgtgtgtgatttccaggaacctcaggccaatggcagcggccagccaactctcttgagtgagcagagtgttcgcactttgttccacgagatgggccacgctgtccactccatcctgggccaaacgcctctacagtccatctccggtactcggtgcgccacggacttcgccgaacttccttccgtattgatggagagctttgcgactgcgccagaggtgctgcgcctctatgcgcgacactggaagaccgacgagcctttgtctgagagcatgatgcagagcatggagctagaccgcactgcgcacgggtccatctacggtgccgttgagaatgaagcacagatcctcatggctctcgtcgatcaggcatatcattcgatcccagccgaagtcagctccgctggcattgattccaccgatatctaccatcgagtcttttccgagtattccagtctacccgagccgaacaatattccgcgcacttcttggcagggcttcttcggccacttgtatggttacggtgccacctactatagctatatatttgatcgcgcgatcgcaaacaaactctggcaggacgtcttcctgtctggtcatgcggcaactgaccgtgccgccggtgagcgatacaagaacgaagtcctccgttggggtggtggccgcaatggctggcagtgtgtggccggtgtcctgggagacaagaacccctccaatgccaacggacggttagctgaaggtggcgacgaggccatgcgtgaggttggccgctggggcctcgggcgtgaaggcgtgtccggataatgtgacacgaatgtacttttattgcctttgacacataccttggagggttttgtaaataaacatattttcacgatttgatttgatcttctgaccgcaattaaactagcatgcattggatgtaatgtccgagactagcccacagctaagccgcgccaccagtgttggcgttgtcggcgttgtcggttatggcggggacggtgattggaatgtctcactgtcccccctttgtttggtctatcacgaaacactctcggtactccagggctggattgcaagctccagatgtcgtttattatgcttgagaagtcttccaagtaggcaaaggaactggaaatgataatttttcagtatacgaggcaactggacttcccagacaagccttatcgcacgttttgccctctgacgtctttcacttgcactatgcatggtggcttgtttagcggctgctatgcgatgataacaggtagcgtcgaactggttgtttatattgaggttatctcctaggcagagcacatgctagatctcagggaaatagattaacagacggtctgttcacctgatcctcttaatcttataaaataccaggcctgatcgtctagaccttatcttctttgttctgcaatttgcaataaatacggaggacctacgttcacttcgtggtaattgaccgctgtctctgactcgttgtatcggatattgcggtttcagcctctgtccctgctcaatcaaactgatatttggcgagaaattatttattcccttggccttcgatcttcctctcgcaaatcaccattcattcaagttcagtctacgcattcaaaatgcctgatatccttattgtcaatgacaatgcttcattcgcttctagcgataccttctctacccaagattcgatagagcaaccacggaccccactccgtcgaagaaatacagttgcaacgctcacacgaaaggtttctcagaggataacaaataaaatcctcaggggcggcgtccaagaacatgcactcagcgaaaaaaatctcaaatatctcaatgacgcaacagatgttgacccaccagatcatgcgatccacgaggtccaaatatacgaccggatttacgaagccattgaagaggaatgccctgttttcgacgtagaagcagcgagggagatgcgtctgcatcagtcatactctgccttctgtcaaaacttcacgctatcggggacaacacggacgaccaggaaattcgacttgtcaatgggaccagagtgggccggggaacatccggagtttccccttgacgaaaccctcgaaaccaatgacacgcttcaattcccgggttctcattcctatcccgaacacataacggtgcatccaaagccccgagcaagcacagtcgaattcccaatatcacacccatccacagatctcgacgcatcacacccagtgacgactgtcgagaggtcaccttcggaatggcccgtcacagacacgccaaatatcgaggaagacttcgaccggatcagttcaagctttgagataacgcccaactccaactccaactacctccaaccaccgcctcatatcatcaccccaactgtctggatggacatgcagcgcatcgagcgggaacgaaaggcagctcgacggcagagactcctcaatccgttccggtcgtggtttatggcaagccaacccctcgtgggggcggaacgatgaagtcgtcgactaacgggttcgactaacgggttcgactaacgggttcgactaacgggttcgactaacgggttcgaataacgggttctgctgtcagacaaagcacggctgggctgagacatcggtttggtttcaaatttgctggttggattttcaatggatttccatcttaattaaacaatcatatttgctttttgctttgaatcatatttatcacggtgcatagcgacctcgggatcactagggactttggttctattggcttctatttcaagcagaaatttgccatttccaaattattatagcgtagcatcattgactatgttctcgattttaggtattaccaagattcgcccataagctgacgctaccccagccccgcggttcggctttcgcctcggaacgtgccatcggaacgtgtctgaactgggggatctacagaaactgggggaactgattccgcacacttcaattccaggctcagagtcgtcttcttaaataaacccagaaatggccttcttctttgtttgcttcgacttttctactcagtatctcgcttctgttgtatcacacaagttcaaaatataaccacatcatggctatccaccgcataataaccgatccagctgcccttctaattgtcggaacccttctcttccttgtctacctgatatatcaacgattcttgcatccgttggcaaaataccccgggccgtttcttgctgccttcacggacttcaacaagttctcgctgttcttgtctctgcgcattgaccaaagaatcttttctttgcatcaaaaatacggacctattgtgcgaatagctccaaacgagctcagcttctggaatcccgaggccgtcgccccaatctacaagtccggaaaggcaatggtcaaaagtccatttttcgatggattcaaaacattcaatccaagtctgtttgggaaccgagatgaaaaagtaagattcagacaaaacaaatgtgttctccgcaatgttctcacaaagaaaccaggttcacgccctgagacggcgacagatggcccatagtttctcgacgagctctttgactgatatggagtcgatttttgatcgacatgtcgaaaacttgcgtcggaagctagacaaatacgcggtatcgggagaccagtttgatctcaaggatctcattgccttttatggctatgatgtaattggggaactggccttcaatctcgatttccactcgcaggaaaaggacgaccccgagaatcttccccctataaatgaccatatccttctcggatgcttgtatggctctcttcccgggatcctgccttggtcaatgaatttgagcaagtatctgccgttttcatggctccgcaagttgctcgggagccggcaaaagattcgcagcacggtggcacaatgcgtggaggacaagacgagtgaatcttctggaaaaacacttctcacaaacctccagaaggcaaaagacccagaaacgggcgaggaattgtcaaatatcgaaatcaactccgaagcgtttggattccttgttgctggttcgcacactacatcagggaccttgactttattttttcaccatcttcttcacaaccccgacgttcggcgccggttggaggaggagatttgtcaaaagctgccgatcattgagcacggcgcctatccgtttcctgggctggagaaaatgttgccgtttatgacggcatgtatccgtgagaatttccgtcactcgccagtctttactatgccattgacacggactgtgatggatcatgcggggatgattatcgatggagaacggatccctcggggagtgagtgattttactattgatgtggaagactttgctaatttgtgtcaggtcaatgtgtccatctcgaactactcattgcaccacaatccgtccatttggggacctgaccatgacgaattcaaccctgatcgttggttggcttccgacggcacggcacaggataaattacagtatctaatgcatttcggagtgggtcataggatgtgcattggacgcaacattgcgacaataagtattgtcaagattatcacgactctatttcgatcctatgattttgacgtgatggataaggatgagcgccttgatgtcatgactgttggcattggtgagaaggaaggtccattgtggtgtcgtgtgagctggagagagtaacatgccaaggatgtgtgatcttcaaatgctcttggtgatggagcgtgttgtagtatcatatagcaatgttgcaaaaagtgaattttccgtctcatttttctggggcataagttcaaggcctaacatattcggttcattgaggctttttaatcagatagtagactaagcctgagttatgaattgccatagtttgaaagctcactacataaaatagatgctaaacttgccactaaaacgaaaatacaaacctccaatcccttcctaagctggggttgtaaactaatcggagccctttgaccatatggcttttccgagcgacaatgataggtttctactatatgtagtagttccatgagtgatacagagtagtattcaagttttaattcaaggcaaagctgaaacgaaagacggaaagtgcacacggaacttgacaatgcgtaacgggaagtgacgaacagtgcgggacagaaacgccgtcaataagccgacagcatatgtatcctataaactcttcatattggaaatacctagaagtaccagatccatttgaacaagaactttttcacacccattatgtctgccgaaattgacgtgcccagcaccgtaagtctagaattcgcatcaaattaaaccagacattgaagccaacatttctagctggatgcacaagctatacgtgttatcatcgttggagcaggactgggagggctggcctgtgccattgcgtgtcgtcgaggtgaacacccgctcgatgtaaccattctcgaacgatctgaagagctcttgcccgtcggcgcagggattcaattaccaccaaatgcaacaagagttatggcccatttcggccttatagaaaagctgaaaagggccggcgctatcactacggaggggtatacgctgagaagatatcgggatggacatacagttgctcaaaagccgttgtagtgacttatggtgctgaatagatgtctgtgccaagtaatcgagttagcttgcttgggatatgctaacgatattcggaaagggtcatacatagggctgactaccaagccttgcttcttgaagaagcaactaacgcaggtgcacatctagtcaaaaatgccgaagtggtcagcatcgagtcgtgtccagccgttgacatggttgtgctaaaggacggcagacgtttccatcccgacatgattattggtgcagacggtaagcatttcttggttcgaaagtgtccataaatcacagttggctaacactggcatcaggactttggtctacaatgcgggagttcattatggatgggccatctccacctctggaaacaggtgatttggcgtatcgtggcatgttttcgctccaagagctcactgtgttaaacgacccagatgtcgagaagcttgttgcagcatctgatgttcaggtctggatggggccggagaaacatgttgcgttttaccccatcagaaataaaacagaattcaatttggtattactgcaagtcacttcaccgcagataatgccaaagccctcagttgacagagtccagttgtccagatgacctacccaaaggatcacgaacgtcagagggcgatttgaaagagatgcgaagtcattttgacggatgggacccggcgtatgattaatacaagcccattgcacgatatgaactaatgcattgacagacttcggaccatgatctcttgtctccgcagagctttgaagtggaagctctgccaccacgaggagctccagagatggacaaaggcgagttattgatcgaatagtattatgttccttgaatctagtctgaccgtgaatagggtactgtgaccttgttaggcgacgcctgtcatcccactttgccataccaagcgcaaggggcggcaatggcagtcgaggatggtgctgtcttaggacagctcttgacgacggcacaaagtcgggcacttccaaattctgcgacggaatttcgtgcgatgattactgacattttaagtctctatgaaaggctgcggaaggagcgaaccgaaacaaacgtccttggggccgtacagagtcgtgatttctatcgcctttgcgatggaagcgagcaaatggaacgcgatcagatcttatccagactccctgattcacaatggacgggggattgcaaatggaactggggagatgctaaatatcaacagagccttcttgggttcgatgtattgggcgacgccgcacgcgagttcaatggcctcgggttttagggctcgggaagaagtgagaagacctttttggggttgatactcgcaccccacttacctgttatgctatgttccactagaatgtaacaatcaaagcctacaaatacacgtttacgccgatcaaaagctatttataacaagtccaaagtacattctgctgcggaaacagtccgcctcttacgtaatatatctcgtgtcgatccacggctggacatatatatattctgccgggatgccttcagagctccgaccatacttacatcatcgtaatcatcccatctcaatgtgaattccagagttgttgtgagatcatgaataatgccacatccaagcggcgttctcgactcaaacccgactgtgagcgaaaacgaccaaagtatgtcttcaaagcgtgtgcatcatgcaaacgcagaaaagttcgctgtaacggcaaaactccttgcgagttctgtgagcgacgttcgatcaagtgttgctattcaaatgagtttgaatcatccacggatcatgtccaccatttgaatgatcgggagttaccgttggaggaaaagaacgttggccgatcggatattgtgtaagagctgtatgattcacatggcgatcgatcgctaattgcgcttcaaggccattgcagcagctgtctcaccttgtggcaactttgcaggataaggtcgagttattacatcacgaaatccaagatgttccgaaagagcgtttgtctagcgtcaagggtgatactgatactcagaaccacccgaagctgaaagatcttcgatctacctcaccatcactgcctgattatactggcccaaccagttctctcttcagcctcggcgttgcgaagatgattctagagcatggcaggccttccagcccagagaagctagatccggagatcgctggatcggtgataacgacaaacgagcaagacatgacacaaatggaggcttgttcatcaactaaaacgggtagtagtgacctgggcctgctgagtgagattaacttgaacgaagctttccgcctcattcatctgtatgatgatatcgtaggcacgttgcttccgatagttgatatcgaaacaatcaaaatgcaagctgaaatgctgtgggcgaacatcatttacgaactgaatccgaatgatagttctggtggcctccgtgaatgcgatgccacccctttgaaaatggttatcgctattgctctgcttgctgagggtggtggctatagccgcgtggcgattgatctgcacgacagcctgctaccaaatgtattgccccatgccgtcttgagaaaattctccttacggggccagcagataatcctactgaatgtacgtgccgctacgcagtatcatattcgactctaatcgaacttgacaacaggccttgttttatatgttccaggatgactacagactcgcgtctcgaatgattactattggctcgcgcactattattgagtccggattacatcggaaaaaagttctttcgcattatttcccacgtccagaggagcagaaggaaatcaccaccctgctctacacttctttcgttctcgatcggcaaatcaacttcgcagctgggttgccgttcactttccgcgacaacgatatcgacattcctgaggtggttcgttttttctaatagctcgatgttaaatgaaaagggtcagcagactaataatagggactacaggaagacgttccatatctgaaagccatgagatcatatgtgcagtttggagcccaaatttggtattccatcacagatgaacacgggaaattcaagcgacggttgaaggaagaaacctttgactttttgagctacaaagtcaaatcatggcaagaaagtctccccaaagctctacagtcgtcccaagacgagctgggatctgtggagagcattcctttcgaggaccgaaaggcctatctcatcagatctatcctgttcctacgagcaaaccagatcaggattttggtcctacgtcctctactttactcataccaaacagcgaaagcgaatcccggccatgcagacacccttgtccaacttgcaacaaacacgatcaataaggttctcgagatggatcgtcaatccaatctatatcgcacacaaataccaattttgaatcatttcctttcatctgcgttgtgttccttgttccttgttcttgctcattattcgcgcctttccaccacggagttcactacgagtgaaagtgccgccgtggtcgatgctattgccaatggcctaagcttactgcgaacttacctattctccctgtcttcacagcggttgctgcgaaagtttactgggccacagggcctgatatctcatcttgggcttctgaaaaactgcaatcactttgacaaattactcttggagaagcttgatattgacaaatttacgggtctagacaatgtcgcgctagatcgaaatccagtgatggagggtaatgatcatcctctgcatgattactccaatccgacaggaagtgagtggcctcttgaattatcattgccatccccagtcacgcccggagatataagccagctatttgctagctatgaattggacttcatgggattcaatctcttatgatcaatgcaacttgtgttttgtgactgtttccaagcagcttgcgcttgatactcttgtttttccgcaacactaaaaatcgacttccctctgaatcacaaaaattctaactcaggtgctgagttatgtttctatgtccgtaaatatacttttagacaaaaaacaaaaaaaaatggactcgcggggaatcgaaccccggaccactcccatgctaagggagtattataccactaaaccacaagcccagttcgatggaagaggccagcatttaatgctatatgaagtgaacttaatctacagcatgtctacggaagggttacgatgttccatactccctaagcatcaatgatatacagtaacatgtgtgtccggtagactaaatcccaagtccaatcattacatggcacctatggatcgtaaacaatcaatgtgatgcaaggaaaagctgatgaacatgctgtaggtatgtaaaaatcataacctgttacttcttactatgtatatatgcaccggttgatccgaaggcaaaatgacaatgtgtaaaatgtgtatgtacatgggacagaggaaggagcagcttcacaaacaaactctcgtaaaagaccagacatggtttaattccctgtcgcacggagtgaatatcactcaaagggggtatggagaaatagaagaattgcataggaaagaaaaagtagtggaaccagccgaatcgctaaaactgacagatgaagcatgggtcgaagcacataccgaaaaacaaggggaaaaggcccgttgtatgcaaataaaaattgatatggcgattctactcatgcgctgcttccaaatcggttcgtaagccaaccggcgagtcccccaacaccctcaccccggctagaccgacggtttctggattcccctccctctggtgtaggggacccgggtggtgacattcgagtggaaagccgactctgcaatgaagaagataatgaggatcgaccgctgcgcacagtgcgagcagaactgcgacgcggttgggatctcggctgctcaggactatcccggatcactaccggattctcaggggtgccttctccgcctctgtgagatataccgtcaactgagagtcgtcgttcatggatacgactcacatacttacgttgtatttgaattgatgctgcgccggcaatgcggacaagtgtcatgctgggtcagccatgcatggatgcagttgtaatgaaaccagtgagcgcatggtaacacagtgacttccaagccgagttcaacgttatccatgcaaatcgaacacactgcttttccttcagatcccatcatctcttcagtgatcttcttcttcggcaaagcttggacggcagcatcagatgctggcggtgccgcagtgctagtccctccaggattatcaaccagttgtgtgatgactcggtcgagctcctcctgcgaatagactgcatccccgcttcgactcatgttgagaagggcagacaatatcgaaagagcatgtgggcttgccgggttacgacctccacgtgagcgtcgtgtagtttgtactccaatgtcagcacgaatggcgtccatgattctagatttgattagtctggtgataatgcaacatagtagccaagtacatactcatttatgtctgtcgggttgcggttgacaggttgaggcgcatctgcattgcggggagagaggcctgggtgatggccagtaaggtggtcgtcctcgagccagtcgggagcggtagaggattgaggatggaaggggtcctctccaaagcctctgtaaccacgggcatttggctccattaaattttgaaaaattgtgtcaaagccgtgcatcatcatcggaaccacagggttcgggccattgttgcgctgaccagaaggccttccggtctcaagtgtcgcgctgctgaatgagaagcgaccgtccggcgatctgtatgtgcgcaaggaggaaaatggaggagtagcccttccgaaaaacccggggccttgctgttcttgcgtgtcttgttcccacggattgtggtctaaccatgggctaacgcgcgaaggcgatacggagtccgcacggcgtgagggggagccttcgggagatatttctggggggatttcaatctagaggaagcgaaagtgtcagaattaaataaaccaagagagaaagtattcgctgtactatttctgtgaactccgattgacaatgtgggcacgtcaaaaaatcaccatccttagtccaaaccccgccacaggcatggcataacatgcggtcgccagtgtccatgtcgcaatacagactgataatcacctagagattatgagatgttgtacaacgtagatgttatgattgaagctgatagaatcgataagcgccagaacagtcacgagtgccttatctgcggggagctggtcacagtcggttagatggccatatttatcggatgaggaagaacagaaagaacagaaagaacaggaagaacaggaagagacggggggttaatatttcacagatggtggtgagccaacgtgcaaggacaaaggatgattagagtgattaatcgagtgagcctccaaccggcggctggaaggaggcaatgacgttgatcagcaaatcgccgccatagcctgaacaaggcaaagggaaccgtcaaccatggacttgtatgaaacaaagaacactctaggtttcatacaaaattagaaaaccatgtgtttggcagccttgtctcctattgttgctcttgtttcaacgcctggtttcatatcggggaatctgtcgcgacgcaagggccaggaggcgaggtatacagctcatattactcaaaaagttaagcctccttttacaccggagagattaagactcaatcatatgatcaattcgtaaagaaactagtacaaagtgtataataaacagcaaaaaatggtcactttttccatgcagggatacaaattcctcgcgatcatctcatccctgccaaatgcactaggagagtgaactgaaaaaagagacagcaatggatatcacagatgcaattcaatcggtaacctcaaaacaccccgaaaacggatgacaacgtcgagcactttacttgatctcgaggagcttaacgtcgaagataagcttggagttggcgggaatgccggggagggccttcttgccgtatgcgagagaaggagggatggagatacgacgctcaccaccgacagccatgccggcgacaccgatgtcccaacccttgatgacctcgccctttccgagcttgaaggtgaaaggcttgcccttcttgttggagtcgaagaccttgccgtcctcgagcttgccgatgtagcgcatagcgacagtgttgccactcttggcagcaacaccctttccgagcttcttgtcgtccatcttgactccacggatctccttaacgccgagagtgccggtgggcttgtcgccggagggggtagggccctgctcgaggttcttggcgaactggaccttcttgtcggtcttggcctccttcttgtcatccttcttgtcctccttcttagcatccttcttgggctcaacagcggcggcatcgccgttgttcttcttgagcttcttctgctgggccttggtcaaggcgggctcctcagccttggtagacttggccttgttggccttagccatcagatcgtcgaggctgacctcatcctcagcagcgcgcttgttcttgcccttcttggactcaacaagcttaggagcctcgtcctcgctctcaacctcggtgattctagggtcctcaatgtcatcaaggtcatcgctctcatcaccatcctgcatggccaagagatcttccatgtcaagctcatcctcatcgggagacagatcgtagtcatcctcctcctcatcgtggtcatggtcatggttgtgttcatcaagaccaatgacgtagttaccggtaaggaagacagtgtggttaccggtgaccttgaagaacacgggctcaccctcgcagacagtgatgtccaggggctgttggtagttctacagaggtattaaacgtcaatattcaaccgattgtgaaactcaagagggtgttcgccttacctggctggggctgagggtgcagataacgctctcatcgagctccaggccctcctcagactcagagtcctcatcgtcaagggcaggacccttacccttgatgagcttggagatggcagccttcaggtcgaagtcctcctcatcgtcctcctcctcatcatcttcctccatggcgtcctcgaggtccttgagggcggcagctgccttgagcttgcgggccttctccttgtcgctaggaccaccgttggactcctcctcgtcatcggagtcctcttcatcctcatcactgtagtcctcatcatcctcgtcatcctcatcgagaagaccaggaggaccgcgaacaatcttcaaagtggaacgggaaggcttgctcgagtcctggtcatcctcgtactctggggcctcatcggggtcgatagcggccatgctgatgcggaactatatttaatgtcagcacaagctgttagccaattgatgattacagtaagactgaccgaagcagcagcgttggggactgcttggaccatcgcaccgggaggaacccggagcgcatagactgcgacaggctgaacagcagacattgtgagtaaaataaagtgacgaaggtgaagaagatcaagttcaaaaatagaatgaaccacgtggaaaaggatgtggatggaaaggaaagaaaagagaaaagaaaagatgctcccaagcaacagatacggcaaaaaaattggagaaaaaaatattgatcaatgagatcaactaaccgttcaccgctggtgtattgccgtgagtgaccgcttccttgaagcttggatccacgtgatggttgccaagcttcgcgcgaaagggcaacatccttttctttacactctcttcttagtcatgatggtagttgtagcccaaaatgggctcccgtcatgagatcaactctagtgcagtgcgcaaacgcattgaaaatcgtacgtttagtctaaatatcaatttccacttttatctgaccatgtctagatgaatttgacgatgaaagaggagaggagtatgaggcctccagcttcggcgggtttggggactacatgcgccggaaaaagatgaagttgcagaatcttgacgcagaaattcgagcatcagctggtgattgcccgccaatattccgtggtgtggttgcccatatcaatgggtacactcaaccttccctgcaagagctgcaccgtttgattgtcagccatgggggtggcttccttcaatatctggatggcaagacagcagctactcatatcattgccactgctctgacccccaagaagcgtgaagagttccgccgctaccgcatagtgaaacctacgtgggtgacagacagtatcaaagcaggacgtctgctgccatgggatgaatttagaatagtagacgagggtgaagcgcaaagagtgctcaagtttgataatggccggtttatcagccagacgaatagccctcgcgcacgttacaatgaccaatcgaggtctagcaggtatagctttcagctcagagatatgagcacaacagaagaagggatcggctcttcatcgaagtccgtgacttcatctattcggtcgaaagcctcacatatgatcacaccaaccatgccgagccagccatctcagtcggactatggcgacttccctagcttcactatggagaacgaggaggaatatcatgaccctgagcacgaacaagctctagccagtgatatagcacaatctataataccacatcaaactcccaattcagatcaggtgcccacttcaccagatccactggttgacctcgaatcaacaacctcgcctctcgaccaaacaagtccaacaaaacccgctttaacttctgaagaatacaatgcgcagctcctgtccgacccaaggatgcagaagtcatctgttgtcaatccagaattcctgcagcagtattatagggagtctcgcctgcatcatctgtcaacctggaaggcggagctgaaagcccaactgcaggccgcaacgcaggaaaatgcacagtctcagagattgaaaaagaaacctgtgcctggatcaagacggtacattctacacgtggacttcgactcattctttgcagctgtctcagttctaaatcatcccgagctccggggaaagcctgttgctatcgcccatggctctggatcaggctccgagattgctagttgtaattatcctgcacgtgctcgcggcgtcaagaatgggatgtggatgaaagctgctttgcaatcatgccccgatctcaaagtcctaccttatgatttccctgcctatgaagaggcgagtcgcaagttctacacctcgatacttgccatcgatggtatcgtgcaaagtgtcagtatcgacgaggctttgatcgatgtcacaaatttatgcgtggaagcaggcggctcagacggaaaggctatatcagaaggatcaacctatcgcgagcaagccaaagcggatgaaattgcgcagaatttacgcgattcaatcagagagaagaccggatgtgaagtctctgtcggaattggcaacaatattcttctcgcaaaagtgtctcttagaaaggccaagcctgctggacagttccaattaaagccagatgctgttttggacttcattggagatctcactgttcgtgatcttcccggagtgggtaatagcatggcaattaaactggaagaactgaacgtgaagtttgtcaaagacatccgagatctcccgagagagagactaatatctggtctgggacccaaaactggaatgaaattgtgggaatacgcccgaggaatcgacagaacagaagttggcgatcaaaccacgaggaaatctgtttcggccgaggtcaactgggggattcgatttgtcaatcaggaccaagcagaggactttgtgcgttctctgtgcgaggagctgaatcgaagattgacggaaaatctagtgaaggggaaacagctcactttaaaggtcatgcgtcgatcgctagacgctccactagaacccgtcaagcatctcggccatggaaagtgtgatacattcaacaagagcgtcgctcttggtgtcgcgactaatgttccagaagtcattggaaaagaagcaatatcgatgttgagaagtttcaatttttcacctggagacttgagaggtctgggtgtgcaaatgaccaaacttgaatcaatcaaatctggcccttcaggccccgagagcagccagcgacaactcaacttccagaagtctccgcctcgccagaaagtcattccagatgcggaccctgacgagctagagagtccgcaaaaagataactatgttcgtattcaatcagatccaatactcagcgatagtgcccacaagccactcaatatctcggggacccaatttattatgcccacccaagcggatcccaaagtcgttgccgagttgcctagggatatcagatcaaggcttgttgcacaagcaaagccgcgccaggattctcgctcagggtctccatgtcctcttccccgtgaagcacgacaacctgcccaagcagacctcccccctcagtctcagctggacccagatgcattggcggcgttgcctgaagatgtccgccaagaagtattgggttattataaccacgcagctatcaacgctgcgtcaccgctcgtgccggtagtaccagagtcgcgcccatcaacatctggttctctcaagtcgagaaggccagtctcaccacccaagaaaagacgtggccgcccgccgaagtcggcaacgattgcgaacaagcctaagcctaagcctctaaaccaatttagctttgggttcgttcttccacgcccagcagctgtatctgctagtctggacgaagaggccttgtctagacaagcgtcaccaaatgtcgaagagccaacccaaccttcggctgaattccttgctgctttacctgaagatatcagacaagagcttcttgaagaacaagaacgcacccgcatgcaacagcgctcgcgagctactgaaaccacacaaagacctccatctagggatcaggaggctcctccttctgcgccaattgccgtagagaaacttctacctttaccacctctccccaagcgtcccgtctttacatcacaacgtctgtcccaattaccagatctacgagatgctgttggctcatggcatgaagtctttgcagctggcggtccgtacagcgaagacgttacttcactatgtacatacctgtccagcgtgacattgcaagagaaagatgtggataaggctgtttcagtggtgcgctggttgatgtggttggtcggtgagcattcgcagcagcaggggcctaaagagccacaggggtctcggcccgagggaactataagctgggaagaggctatagagaccatgcagaatagtgtccaggtggctctggaacaaagagagcttcccccggtggacttttcgtaaatgatacccaaatgtcagacaaaacatcgttgcctgtatatatctaaatgagtgcagaaaggtcaacaatatatgtaagatttgtaatatttgtacaaatacgctatatacagtacacaccaaagccgaaagatgtcacctctccggagaagggagaaaaatcgaagaaaatcgagggttgaagatgatagaagatgaggcagatcaaggtggagtcgtggtagcgtggcatgccccatacgcaggtgtattgccccacatctgtcacctccacctccgacttctaccccgtgtctttgacctttcagacaacaaacccgtcatgccgcctgtcaccgatggtcagttctccttcaatatcgacacattttatgtcaccgcgtcgggaggacagcttcaccgccgtgcagctccagctgagatcaaagccctttacgatactgcgactaccgacaagagcacaccagaccacccaggccattggtatgaagcacagctcctccactatggcctaccaccgtcaaaggtcaaggcgactgctaagatgaggctcttaaaggccgtgcaagacggcgccctgagcgttcccaaggaaagcctccaaatcgaaaagaatctgaagaaggaatggaagaagcaggattcggaggaaccagcaaagaccaacacgaagacgacaacgacgaagactgttaccaccaagactattacggtttctaagacggttgcgtccaaaaccaccgagagcaagactactgcgtccaaagccgcggccaagcctgcagccgtcaaaactgcggctcccaaggctgctacgtccaaagctgctatctccaaaaaagatcccgcactcaaggccactgcctccaaagccactgcggctaaaaccgctgcggccaaagctaccacgaccaaggctgctcctaaagccgcggccaaacctgctgctggcaaaactgcaactgccaagccagctacgcctaaggctgcctccaagaaggctacggcgcccaaggccgctgcccccaaagccacgacaaccaaaagtgctacctctcaatctgccccagccaagagaaagagggcctcgaatgccgaggagacagccgacaaaccacagaccgccaaacgccgcgtgtatggcaaaaagacccaagacaacacaaatatgcccacaaacagctaccccgggccgagtggatggtctgagcagcctgagcagcctgagcatcaggatgcgcctccctcgtacgaaatcgcctgcagaatggtaaatatattctccctcattcacaaacgcaatggatacttacctaacatgtctaattaggacggagaacatccctatgatgctttagatgaccaggtggacattgacggtccgaacgagtttggttatggccattatagcgagtctgaaacatgctcagagccaccatctccacctcgagccctgaaaaacaccctgggtcttctcaatggaacgtacgaagttcgttgcccccatatcgagtgcgagtggccggacgctgttcgcgggggaatcttcttatctcttcgccttaatgggaatgagatttgggggacatacgaactcggggcgtttaagggtgtactgtggatgccacaacgacccatgaggccctcctttgacagaattccgtttaagtggcgtgggcgggagaccggtgagggtgagatgagctttgcagatgaccaggatggttggattgagtttttgggtgatggtgatattgttgggatgatcagctgctatggtgatgtccatttccgagggcagcggattgatagttctgtccgcacagccagtgatctgcggaacgaatggaatcgctacaacgaagaggaatatgaccgagggtgtaggagtcgatggtgaatgatcctgaactgaatgaaggcatggggtccagcgaaaaccagtgctagctaatggatatcttgattaaatgatgcccaagtggtctatttgaccctagttcaaggtagtaagtcaaaatcctccctggatggccgagtgggtgagagacacgaagtcatctgattgctgggtgaaacattgatcacgggtgataccgcattgggaaacccagcaatggggaaactggtcagggtttcgatcctcgccaggagtagttggggcacggatttccttttttgttccttctccatgtcagcccttcactcttccttccacttatctcgtgatacagcggtgaaatagctctttctaacaggatattctgatatcatggaatgatcattgccttttgtttgtgttcaattgggcccgtctcagggaagtcacgatgttctcatgcacttggcactgggggttacaatcaacccactctgtcggtaccaatgtcttttgctatataaattgatgagcattatattcccaccaccgactaatgttttatatacagacccacacccaaatctagaccatttgcgagcctatcagcgaaagaattcgacagtctagcttgcgacagaacacttattccagagcatctacgcccgcagcctttaggcccaggcaccgacgatgctcatgcaaaaagcacccgaaaaaaccaggatgcaggcataaacccttctcttcccacggagaatacgccagctctcatcactgagaaagtcttccgacatcaactccaccagcgaggcaaaaatcaaaagtccagctgacatggcattcataacaccgacaacgagcaaaccaacctccgagtcgggattataaagtgtatgggttgcgaggccaatagcttgcccgattggagtcctagtattttgtcagcaccattgggcccagagtgagtggggattaactcacgtgcatccgtacgcaagggacatgatccagggctggagttgcttttctgaccagggaagtgaggcaatgcgggatccaagcgccaggccttcaaatgtttctgtggttgatttagtcaaattcattgccccgatcaagcaggcgaatacagagaactcacgatgaaatacaattgcaatgagcagaatcacaaattcactgccaaccgacacactgagtgacatgccgataaacacgctgtggaaaagaatacccatttcaagaaggtagacctgcatggtctctttcttctgcttctgctccggggttaaggcgaaggtatcgtcgtgacgctccacgtctgtctggatagccccgttatctttctcgtggtgagttggaacatcaggcgcagatgaaactcgaactatatcttcagtcccttcgcccattctattgatcgctcggcttatgctcgcggaccttccaattagcggacccatatctcgcaaatgccggccttccattccaacggagtgcgagcgcggcactatagagtggccgagatactcaggaacaccgagagttggaattggaggtgtccttgcatccgaagggcagggagctggcctttcggctgggacctggtttcctccacggcagatactctgggctggactgaataccatttcgatgactgtaacgagaaatatgccacccaaggcaatggcacccggcatggctgggtagtcctttgtccagaaattagagagacatgggtcgcccagcgaagtaaatgccgtcggaaggagatgtacaaatgccgtggcgacgaggacacccgttccaaaatgggtgacgaagaaaaggaacgcaggtggaatatgcattcgtggaaagcgagttgcaaggatagggaatgcacatgcaatgcttgaggtggccaggatgatgaagagggctgcaacgtgcaaaggtaggtcgtatgcaccgccgtcacctccctgagcacaacttgatcgtttggctggctctgtaaacggcattgcaacaggtgcttccagtgtgagagcttgctttggcgttaagtaccgtctcagattatcgaaggagatgactgccgagacaagaagcacggagaggagccacaacgcccaatccttgatactctgatatgatgggaaaacattggtatttgaatccaatccattgtgattgatttcgatattagtatttttgggagcgaggcgtcctgttcactggttagaaggttattactcaaaaaaacatgcttgcttttcatacctgacattgtcagggacgcctcgcaccccgcgccaaggtgattgcctgcatccttttcctccagcgtaggaattaccttgcaattggagcttccccgtaaagtacccggaccagactcatcgtctttcttctcgcgggtgtttgagatgccatcgaggtcttggcgggttgtcaggtcgggagaaaggaagcgcgggctctggttccacccatcgtgcagcaaagtgtcgtcagtccgagatgggcagttcatggtgctatttgaatgatttttctaacttcgctatctggattcagtgtaacaggtgaaaattatagccagcactgatcccgagggcttggcatggggtggactccgtcccgacttttcttggcagtcggctatgaaatcattgcggctcaggcaacctccggtattggccgaactacgattaccggagacaatatgtttgcgttgcaaggcctgaaaactccatgacgtgaaaccgaggtcactagaatgtgtcccagaacgataggtctagcgaggttccaagtttgatccaagactactaatcgactggcaggacctctagagaaacagccctggagggtcaatgtagggttgataggtgcctgcaaattgatacaggaactagttattacaggagcacaacagtgcacattgatattcgtgttctttttcttatggtcattttgcccagggagccttggtatgcacattggcacttccatcctgtgaagccgggggccgagactgagcagaaaagggtgctctgacgggtgacatgggacctggaggcatccttgaagtatctggaagagcagagggaactctggtcgtaccactgggaattccctctcttctcatcccagcccacggggctgctgtcgagcccatcgggggaacagcttgcgtgcctgtcccggacttagcccagggagcctgggtgccagctccgggcatagaacgggtagcggcaacagacgggtggccagaatccggcgcaatggggcgtgactgaggaccagatgtggcatgaaccgtggaggggggcacaggcgcatttggatcatggtcccaactgaacagagatccgaaagggaagtgctgtactacggggaattttgaaagaacttccgcgttgtacatcttgatcattccctggtgcaacatgtcagcgtgaacatccccactgcttaaagattgcgaaccttattgatctttccccagccagctcgaatgccagaaatatcgaataacatggggctgtgctcccagaatgggcctctcttcacatcataaataaatccaatagcggagaaatatagattactttggcgttctctttcaacaatctttgcattggctaccccggctgggtcaggtgcattaagtagtgagccttcttcgggagttaggtcagtatcgttgattgcaggcgataattgtgcggatccaaagatataagggacaaaggaatgatcatcaagaccccagacgccgtgggagccagcaggctctaggttatatgtcttgataagtagtctgataagctctaggtatctatatgacgacagtcagtaggggacgaagcatatctgacgtgttagattctgggtagacgcacggatggatcactccaaccacgatagctcgttcctccacacctggatcggccttgggaaatccattcagcttccatattccacctaggaaagctaggaagctgagttcatgaccggtaccatagtccaaccgctggccacttccccagctacccaagaaatatgatttcaactcggtctccgccgttgcgctctcacccgatgatcccctatccaagaggtcggccggtaggcattccctcaacaggtcggatgcgcgactttcgaccacctcagaccatctccggaagcttatatttccaaacctccgcggaccagtatctggtgggacctcctgtatgatatcttctagtttcaagagaagtccctgcaattgtcggaccggagcggagtattgtatcgcatcgctattgagagtccaagtttgtatagtatcatcggcaagcttcagtggaaacatagatcggttgagttgtagtatccacgtcatgatatcagtataggctttggatgtcaggaaagccgatacatcttgcgagtcgtgaatttttttgttcggttcgataaatacgtgctctgcagagtccaaagtggccaaaacacgaatagcctgggcgtaagccatgtttgctgagaaaatccgaggtcggagtgggatgaggaaagaaagttggaggggaagcgggatgttatttgcggctccaccagagctcttccctcaccgcgtgttgtcattcttttgaattccccacgcgtttttgaagatggcgccaaaaagatccacacatcggcatcgatctaccgattacactcttggactcttgaataatatcaatgtcctccggcgcaattccacggatatacaggaccctaaaaggcgccgccgcaccaccgacacggatgtctatgatgttcctctctccccttctccgacaagaactcgaaagacccctcaaactgaaccgaaaaataccaaccggttgagtctgagaacccgtaaagtgcctaggccatcaccaccgggttcaccccccagcgtttctgaaaacaacgaagacaaagggcccagcaacgacgaatccgggtcaggcgatgacgagtcccaatcaattcaaaatggatccggcagcagtttaaaggaggaactggatgataaccgcgacgagcttcagcctgaggttgaacatgatccgttacccgaaccagtcgatctgttcccagccgaagacgaggatcgagctgatggtcaggttggttacgaagctagaagtgcacaacaagatgtatccggggatggatctggatctgaaggagaagaagagaaggacaaccagcctaaagagaaatctagagatgcacaagacaatccatctgaggacgaatccgaagatgaagatgatgaagagacggatgctcatgctggggaggaagtcatagacgcagaagacaatctatctgaaaaggacccggaatatgaagatgaagatgatgaggaagaagaagaagaagaagaagaagaggcagatgataattctcccgccgaagtccagaatcattcaataccgacccagcatattgcaaatgcagacacacccgacgtgcaaatcctcgaaagtataccaagaaaccaaggagatggcgcacatgtaagtcgcatgtcaaaaaatactcaaggattccagaatgcctcgtcacagcttttggaagtaccagagtcaccaacaatcgagccatcgcgcccaaatcaggaccatcgcagcgctcgctccgatatcttcacgtggctgaccgagaccacgaaagaatctggtttcaaggagacctgggacgaacttcgcaagataagaaaaatccttaaggcccaagctgctcccgctacaaaagagcatttcatgggcatcgtaaagctcattcagcggctacgaggtgtgtttgcaacaatgatcaatgatcctgcttcagcttcttccttgagaaaccagtgcaggctcatcgccaacagcatcttcaaagagaatcagtggatcatttacaccgaagccccagagaatgaagatgatggtgcccaactggtcaatcagcttgaagcccatattgttccccgactgattgacctggtcatacttggattcaagacctacaggacattacatgatcgggtggtgccacatttccgcattatcctggatttgctttggggttcctgtgataggatatcttctctcgtcgaggtgaattatgatattagtgcgggcgtggtggctcattctaaaagagcgatgcgacacgtgaaggctctaaaggatgcactgaaagatggccgactacgtgagacacctcatcgcatgcccaaacgccatctaccatatcggccctttgagttggaagaggtcgatagccatatctcctgtggacggtggatccatgcagagacgaatgcactccgtgatggtttacaattatatgagggtaagactttccatttctcatgccatatgctattctgatggtgtcaacaggggaagatagatatattgatatgaagtgtgacaacgcaatcggcggtcaactatccgagcgcatcctgcaacatatccatggccaagccgtcaaactcgggttggatgatccatgacctaattgagtattgggagagactagatcgggggtgatattagcggcattgtatagtaggctcgatttcaatacccttttgcgagactggagttcatagagaccaaaagtgtcgatgtatatatttggccgaggtattcatgtggggtcggcccgcgaaccacaaaccgcgaaccacaggcattgtcttgaacatccatggatgtcaaatatcatgtccacattgaatacagtatacccggaagctttattatccttcctacgagcgacaatatagatatttcggtaaaatttgcggataggtttaatatttgtgagctactcagggctggttttgcatcaggaggaatttcgtccttgggctcctgatcctgtgtcttagacatcttgggtacctacatgtacatagcctggtactttaaggagacttctaggacttagggagctattataatgcgtacatatgtaggtgcaaggctccaaagctacaagacaaatactatagagcaaaaatgaacacaattagtctgatcttggacccggtcaaagccagcctatattaactgtattctgatcatctagataaagacagagacaatatcagcagatcccccggatgcacgacccatgtagggggtctataaagaaaggctccaaagtatagagcagcggcgatccccccctcctaaattgacaccgctttctctttttcccgctttccccttttctcccccaaagcatcctgacaacatttgcttttgtcggtttaatttcctctttttttaaaaaaacaactgtgctggacttctctgggtctggagatcagtcttcaagtaattgtgaagatttccctttggaacggttgtgcggcgcgtgagtacattcttctcttttctgcatgtttgtttatagacgggagcttcggtcgagctggacaatgacccagttctgccatgggcatagctggaataccttgaacgactggggcaaaaagatttcatgcttatgcccagcgcgctataagcccctgacctggccattacagttgcatcgattcgagcgcttgaatctggggttgcgactccgagcataccagctggataattatgcgtttaggggtataacagctgacaacgcttttcgcagacagcttactggtacatgccaactgaaccttaccacgaagcttgccccctttaatacattaatcttgaacaatccaccgatatgtcgtcaaacgaaccggtcgtcgcccctgctcctgtggaggtcgatgagaatgagcccccagccaccccgatagattcgagcatcgtctctgaaagcgacgagttgcttaagcccagccccgaagtatccaaggaaagccgtgcgatctctccggccaaggctagccctgatacaccgagcaccgagaagcgtcctgtgtctggcgcatccaccaccaaacggcccacctcatcctccgcctcgaaacctacgacgggtaccacccgaccgacctccggcactctgaacaaacctcccactcgtcccccggccacgacaaccacccggaagcaactgagcacctcgactgtctcgtcccaccggtctcacaagtcagtcagcagctctgcagatgagaagcctcggtctgtggcgagctcaggagatgagaggcgcggaatctctggatctgcgaagcgcatgtctatggccggtacagcctcgacccgcgctcctctcaaacccacctcgtctttcgatcgtagatcgagcgttgcaggccccactgccgagaggaagcccgccaccacaagtgcgcgcaccgcgaccgcgacctcgacaagcaagcccgtgggcaggctgacttcgacgacgacacctgcaagccggactgctacttctacctccaccgctagacctgctactgttcggccaccctcgactacgagcaccgctaggcctgtcactgccaccgactccaagaagcgattgagtacgcttcctgggtcaattggccgtgctggtgattctgagaagctgcaggccctccagactaagctcgccgagagcgaggagaccgtcgctagtttgaagtctgaattggagactgtcaatgagaagctcagccagctttctgtctcggcccaagaacccctgggtgatactggtgccaccgaggccattcgcgcggatcacgccgcagagattgagaaattgacatcagcccatgccgacgagctccaggccctgcaagcgcgactagacgaagccgagtcccaacggaaagaactggagaagagctcgcaaaaggagttggaggaagccagacaatccgccgcggcgcaaggggatgacaggacagttgccctacttgacgagctcaaggcaacacatcaaacccagcttgaggccatcgaaaaagagctggcagagcacaagtctgcagctactcacttcgaggagcagatcggtgctctgaagaaggaactcgagtttcaaaagcttgctctggaagaagaaaaagctctagagctcgaaaacttcaaccgagaactcaagggccgtgatcaggtgttagaaaatcttaacacggagattgctaagctgactacactcaaggagcaagaggtccgtgctgcggaagagtctgctaaggagagtgtttctggtcttcaagagcaagtagccgcactcgaggcgaagcttgctgcggctgagtctgctacccaggaaagctccgaggagaaccctttgatcgccgagaaggatcaagaaatcaccgagcttaagcaggcccttgagaaaattcaaagtgagctccaggaggcacgtgacgccgcggccactgaattgtcatcgaaggttgtggagttagagactgcccatgaggctgctatcgcaagcctcaaggccgaacatgaaagtgctatcagtgagatttcggcttcccacgcggaaaaactcactagtgccatagcggcggcggaatcgagcggggcagaacacaccacgcaaatccaggaactccgtgatgccctcgaggcgtccaaggccactgcccagaaaggacaagaagatgccgttgctgaactgaaggccgcacatgatgcagagctcaaatcactacaagaacagctggaggcttccgagaatgccctcggcgagtcccgccgtgcactggatgagggtaacgcctctgcacaagaagatgccgttgctgaaatgaaggccgcacatgatgcagaactcaaatcgctacaggaacagctggaggcttccgagaatgccctcagtgagtcccgccgtgcactgaatgagggtaatgcctccgcacaagatgttgccatccaagagattgacgctcttcgacaaaagtgtgagtcgctggaatcacaactgaccactggcactgggaaaatcaacgcgctgctcgaagaaatgcagctcaagcaagctgaagtcgaaaagatctcccgcactctacgggataatgaagatcactccaagcaagaaggtttacagaaggacaataagatgaaggctctggagcagaaggctgcagaagctgttgtgcttctcgaacaacacaccttgcaggctgcggatgtggctgagaagcacgcaaaggccctggaagagttgaaggctgaacatgctgctcagcttgcatccgaattagagcgggtcaaggaggcatcgggatctaatgaaagcgctctgagtgatcttcagatgaagcacacaaaggctctggaagaattgaaggctgaacatgctgctcagcttgcatccgaattagagcgggtcaaggaggcatcgggatccaatgaaagcgctctgagtgatcttcagacgaagcacgatgagttgcttgccacaaacaaggaattagagtctacccacgctacccggattcagtcgcttgaagctgatttgagggcggtactcgaaaaccacgctcttgagattgctacccacaccgagggtcgcgaaaaggagaccgccgaactccaaaatcaattcgaagaaacccaggcgaagttgcaagccgagatttccgctttgcagagttccagcaaagctgatgccgagcttcacaagcagcaaatcgccgaactgcaaaaaggctttgaagaggccaaaacccagctgcgggctgagatcgaggctgcccaaacctccaaggctgctgaaatcgatgctgagcacaacaaggcaattgccgaactgctgcagggatttgaaaagaccaaagctcagctgcaggttgagattgaggctgccaaggcctccagggccactgacctcgatgctgagcacaacaaggcaattgccgaactgctggagggcttcgaacagaccaaagccaagctgcaggttgagattgaggctgttcatacctccaaggctgctgaaatcgatgccgagcacggaaaggcgatcgagcagcttctaactatgagcgaggctaagctgtctggcctcagggaggagttcgaggcttctaataataccaagattgccgatctccagaaggcccacgatgcagcactagccagtgtcaacgagcagttgtctcaggccaaggccgctgcccaagacacctccgttctggatgacttaaaggccacagtcgccgatctgcaggccaagcttgctgattctgagaaggctcgccttgcggtacaggaatctgccaccacttcttccaaggaaattgagggttactcagctgagctcgccaagatccaggccgaccatgctgcacttggagagaaataccaagccgcggtcgcccaggtgggtgaactcgagagacttgccaaggactcagacagccagaagtcgcaccttgagtcgattatgaagcagctctctgaatcccgcgaccagctcctcaaggccaaggccgataacgccgccatctccgactcgctcgttgattgcaggaaccaaaacaagaccttgtccgagaagcttgaagctggcgaacgtgacctgaacgatcagatcgacaagaacatgggtctcctcaaccagcttggcgacgttgattccgctatctctgccagccgccgacgggtccgcgaactcgaaaccgagctcgcagttctgaaggcggacagtggcgagaagagcagctcttcgggcttggacgctagccggtgggcgacagctgatgagggtagcgacaacgctgaagatgggggtccagccacaacggaaggtgaggacctaggcccatccattgagggaacggtgggagatccccgattgaagaagtcttcctactcatcagatcttcccgcattccacccattcacatgattatgaagactattcagcgtatacagaggactaatacattccatagatggccagcctccaagaacagcttaggcacatccgaacagccagtgaggattggtacagcgagcaccacaggtcagtcaaatatgcgctcgtattgaaaatcatgctgatccctccagactcattgccgaacttgctcaactcccccggcaagcatcctccgactctcccagcccttcgaccacacccaattccgaagtcccaccagcccccgagccagaaccttctcgcacccgcgccgcaacagtctcatttttcgggagacgctaagtttcgcgtggatatggcacctttctgagctcttagtcgtgatgcagcacgacttaatcttgaatcctgtttcactctgctcttgtgattctactgtatgtaataactacgcaggataccctgtcttactatgtcggggtttcccactattcttgtttcaatatctttatcttacacatacaacttgtttgagttgaactttgtgtcatccgtcttgcgttactgcaatggtcagattggtacttactagcgagagatgcgtaagtggttcgatgcttggtccaagaatgcaggaatggataattcaagcgcaatgatcgaaagtctagaacaaagtgggtatctcaatataaaacaataaagttcaaagaacgcctttccccatgccccgaaatagtgcgcaaaggtgaattcaaaatcactccgagtcggaagggtagctgaccagcgctgatgtcggcgccacggcagaggaattgacttctgtgccactgtggtcttcacggagggatggagtcgaagaggtggcaactttcctcttcttgatgctaggctgccatgcattctgattatctgcatcattcaccaagaacggatcaatcatagcacgagtattcccaaccagctcacggtgtagagaagctttccgcgtcgcaaccaagtcatccttcttaagtcgcttcgaagaacgagatttcttctcttccggccgcgtctttggtgcaggcttttccgcccgctgctcaaacataggctgaagacgagtcatacgggcagcacgcacagccgggtcctcgccaaactccaccatgctcgctctctgccgatccccctcagtctcatccaaaagctcaatcccaagactcattttatccttgagggcctccgtcttcgccttagtcttctcaagccccttcctttgctgccgaaacgtcctccgcaaccgcatcgacttctcatacggatcctcccaatcgcgattctgccgttcctgaagctcaagaatacgagtcgcctccgtccgcgcacgaatcttatcctcaaccttaccctcaatcttcgaaaaaggatccttctccgagggatccatctctcgcgcgtacggcttgatagcaatctccccaggctgcagctccttatcctcgccagtatcacgtttccgcccaccttcggtaacgacatacgctgtgttctggggatcggtcttgatctcgatggtcccgccacatacggtgtgtttcatgcgaaagctgtatatcggcgtcgagtagtagttgcctacttttttcttctctgcgttgaagcgcacgccctggccgattattacggggtgcggtttgcacgttgtgcaccatactgcgaagggcatctcgaagcgcacgattagcgcgcctgttgcgtgcaggtggcgggcgcgcgcgccgagggcgtgcttccccnnnnnnnnnnnnnnnnnnnnnnnnnnnnnnnnnnnnnnnnnnnnnnnnnnnnnnnnnnnnnnnnnnnnnnnnnnnnnnnnnnnnnnnnnnnnnnnnnnnnnnnnnnnnnnnnnnnnnnnnnnnnnnnnnnnnnnnnnnnnnnnnnnnnnnnnnnnnnnnnnnnnnnnnnnnnnnnnnnnnnnnnnnnnnnnnnnnnnnnnnnnnnnnnnnnnnnnnnnnnnnnnnnnnnnnnnnnnnnnnnnnnnnnnnnnnnnnnnnnnnnnnngattagcccgcgtgttgggggcggggggggggcgcgcgcgccgagtgcgtgcttccccgcgagtttgtttccggttgttaggccttcttggtctggggggacatagctggtggaaatgtgagctgggggttatgtggatttggatgttttgctgaccgtcccatatctattgaggtggcatgttagttggttgtttcgtatgttctttggggtgggattaggacttactgaagccttgcatcttgggcgagttgggtaggtgttgccgtcggtgtaattgaagcttagagagtgtacaggttactggccgcgcgaagacagccagtccgagttgatagtgttgtagaagcgaagttgtcggcggaactgactttagtcggagatagcgggattaagacgggtgcggatgactcatcatttatttttgcatgtatacttgaagaagacatcaccagaaacaaaaaaaaccgaccattcaacaaagtagatcaaagaaagatttatcaggctaatcaaccataacgcttgatataatggtacactgaaatataccgacatacatcgacctcattcttacagcatgaacccatacttcgtcatacattcttatgaataactttttcgttacccaattttgctaaactatttagatagggtttctgggctgattcaagaatcagatttgcatttccttctctattcctcccttcttgcgaggcctccgtttttagtaacatccatcgcatccagtcgcccgaagccttctcggaaaatggaccaaggcacgcgcaaagagacagagcggctgatcttggagctgctattggaagacgtgaacagcaatatccataggctcggagaacagccattgccgaaggatacaactcacccgacctacagactagaagaactagagcctgacaggagggtggcacttcatatatggaaatccgaaatcgaaagacaaagggtcacattgagatattctcagatggctaaagctctatccccaggaagggaggtgaaggagacacaatttcccaagggaacgaagacattttccaaacatacctccaccgctattcagaagctggttcgctttttcaagaacctcatgcgatctatcaaagccctgattcccgcccacttctcactgccccaggtctgcagctcctgtagagaagtccacagcgaaatcttcaaaacacaatgctcccacttctattgcaagaattgcttgatccgcatggtcacaaaatctttagtagatgaatccttgttccctctacaatgctgccacaagaaaatcgaaggctcggaaatgaagaagatgatagggtccgcattggcccaagaacaaaggaagaggcaaaccgagctcagcgatccagaccgaacctattgttcggattgcacatgctctcgatatatctcgccagcgaataaatcttggccagatttgatctttaaaccggctttaacctgccagtgtggtgtacgcacgtgcagggtatgcaagaagagtgctcacgagggcaagtgtctacctcagctagactggttgatggagaaattgatgaacaagaagagttggaagcgatgtactaaatgcagccgtgtgattgagcttaaagagggctgtcctcatatcatgtaagtggttctttggccctttatcgaccctctaagctattacggggacttttaatgacacctgacagttgtatttgcagagcccaatggtgctaccactgcgggaagaaatggaaaacttgcgactgtccgaaatagggatgggaatcaattcaaaaaattgatttttatcactccaaccgatttatcaagaccaaccatgtggataatacactggttattctgactgaacttggcccggagagtaaaatatatgacctgagtacgcttggcttggaggatcctgatgatatatgaaattgctcaactacttatatgtgagtaatgtggtgttgccttctttcgctcaaggtaagccaattgatacttccatattgctatacaagcgaaaatcgagacacgtacataatttcagagtcatgcgtagtatatccatattaggcactgtataagctccgatagttccttggaagctagattttagatactaaaagagcgtattatttgtgctgtatggaggccttgcttttcgggcattcgcatgggtatacgtagtatcaacctcaccaccaactctcttttgccaaaagagggttatttattttcataacacatctcttactctagaccccttcatcacgtgggctacgatacggatcaggatacgcagtctctaagtcttacagctattattggtggacagaacgaggagacgaacgaactaaagaaataataaacaagatagggagtcacgttcatgagatcccgaaagaatatgggcacggccatttcaatgggactagggttagagacagaagatcacttggccaagtataagaagaaaagaccctcttccaattcattctctgtcgagattcggcaaactggcgattccattgaaaatgccatcagcttgaccgacacccccaaagttgagatttggcgtgaatgtgtctcctgccgggacgatcatctccaagacaatatgctcaagacaaagtgctcgcacttctattgcaagggttgcttggttcgcctgttcaaaaatgctttgcgtgatgaatccttattccctcctcgatgctgccgcaatccaattacggcctcgaagacgattctcggatccgcattggttcaacagcacaaagacaaggtgattgagctcaatgaccccgacaggacatattgttctgatttgaagtgcgcccgatacctcccacgaaatggcacgcgagctaaggtttgcaaatgcgcgagctgtggagtacgcacatgcaggaaatgcaaaaaaagcgcccacgatggaccctgtctatacaagcttgatgcgcttttggaggaattggcggattgcaagcaatggcaacgatgctccaaatgcagccgtctggtcgagctcagaacaggctgtaatcacatcacgtaagggcgatttcatttatcattgattactctcttcgctgtcttccactgtgggagcgtttggactcacatctactaggtgcttttgcaagttcgaattctgttatctttgcgggaaaaggtggaaaacgtgtccctgtatcttcgcagacgaagataatctttacgaatgagattgaactagccgagtcaagggagtgctctaggtttgccttggggcgaacaggataaggtacacaaatgatctgggagatcgacattacccagccctagcgtcaatcgatctcatttattttcaaggattagcctaaattgagcattaagtagctatcttgtcgacaatgaggcatttactgacctgtggtttctaaacatggagaaaaaagacacatatgttagccatcataattgcatagtcttctcagttatatagacttttctgtaaatacgatacaaagtactataataaggagcatgtaagttctttatacccctcattatgacttcacttaaaaaggaatatttggtaaacacggtcaaagttctcgatgttctaagactattccacctcgttttgcaagggaatccacaattttgtcataaatcaactcaatcactctgatttggactcagatcacagtgactaccaaccgagctatgacacagttaggagaactcatgagtaagattcggggacgcatcttcacgaggggtgcagccctgtcactggataaagagcttgaacaaaaagcctcgtcaaatcctaaaatgcaagggaagatgtctgcggtgccaggtgagtatgttatctcggatgatagcgatgaagacttgcttgatgaaggcttggatgatcagtatgagtgtacatgttgtacggaaaagtatccgcagtcggatattattcaaaccgaatgtgctcacacttattgtcgggaatgtattgtgcgcctttttgagaatgcccttgcaaacgaagcctcatttcctcctcgatgctgccgcctgccaattgctgtctctatcaccgtcgaggatatgataggcattgagattatgaagagatacaaggaaagaaacaccgaggtcaacgactgtcatagaacttattgttcaaactcaccctgctctcgctatatcccgccacagaacatccgccgtggggtgggaatctgccagtcctgtgccgctcgaacgtgcgccgattgcaaaaggcagggacatagaggtaattgcaaccatcagaacaccgagaagtgtaagcgtgcttctaaggcaaagaagcgtaagcgtgtttctaaggtcaagaagcgcaagagagcttctaatgccaaggagcggaagagtgcttctaatgagaaggctaagcaagcttatgatgacgagatgaatgataatttgctggaacgcctggcaaataggaagaagtggaagcgatgttcaaattgctctagaatgatagagcatatcgatggctgcatgcacatatcgtaggccgaatgctgctcccgtgaatctcagaacccttgaaaactgaccacgtcgtctagctgcctatgtggatgggaattctgttatgtgtgtggcgaaaagtggcggaactgccgtcattggtgaatgttcttctcgtactcaatcaagactttacccaagactatgctacgctcagagagtggtctcacctaattaggccaggtatttttttggcactcaatttcaatacgtgtgagtgacatataccatagtccaggcctcgaaaatggtagctcaatacactaaagatcaagaaatctatcactattcatgaggcctgtacaatccatccatagtacatatggatgggcttgtagtaatgccaggctactattatacataagaaatagcatacttaacctctgcaattcatcaatggtatagcgtatgaaccagctaccataacgcgaaagtttatccagtagtgcctgtattgcagtacgcgaaccaagcctctcttcctgccagcgccgcttcaaattatccacgtctctttttgttatacaactcccctgatttataggatcggtaggattggtggctgttgtacgacgaaaatcgaggataaaacgatttggaaagaatcttttcgcggctggagcaccgaacagagtatccgtgccccagctttaaacatactaaatctccggacactttatatcgaacgttggcatgcacccatccacctatttccttaccattaggactatcttactggtcggattccggttcattttaatacctcccctctgctgcacgatataactgaccgctgcttgtgtacatctagaagcttttcccaaggttgttgaatcttcgagttcaaaacccttggagtggcctgtactattctaaactaaagtagctcaacatagtataggtctctactattcctccaccccttagcccacgtgacttctgtaatccagtttcaatgtcagctccgaagtcacaaaaaagtgcagatgatagtcatgccaccttcccttttggcacacgtattgaaagtggagtgccatgattgacctctcgtggcagacagctcgatctcaacttatttgctttgatattttgtattgacttggcgtgtgtcggatgagctccatggcagctttgatagccataatcacagtcaattaaacagaagataaagtcaccttggtctaactacctgggtccaaaacgtattgctgctccgacgtccaaattaaagttccttttggatcattgttcttccgccccagatcaatccgtggatcagtctacgcggaagcttcgaatcaacagtggcctgcctgtcttccaatcgacatcatgttgcccaaattcttgcaaagcagctacattcgctataaggatgacaccaacagctttgcaacctggctccttaaggcagccggcaaatgtggctaccaaccccagggcctcacttctaccgcgcccacctccaaaaatggcaaaaacaagagcagaaataaggcggcaaatgactcagatccagtccagtacaccatgactgttaaggatcttcaattgctggctgatgttgtggccaagtctgctctcactgtgcctacacaagttctcatcatcgtcaaaagagcgatcaaattgaggaaacatgtcacgtcttggtttttggggcaaggcgactccgacaataacaagcgacacactcattttatctccgcactggaaaaggtctgtgagaccctggaatggaagatgaacaactcttccaatccggatagtaatcaacctcctccaacctccgaatccggaggtggcgatgccgaccttgacatgttcctcaacaaatttgctgtacttaccgtcgaggagccacaagagactcaagagggacagcagaaatcccccgaatcgaaacaggttgtgaaggtggagattgttgagaatgacgaggatgaggacacgagttatttccgcctcatattcttcaaaacatactgcatgttccaggatttgaacaacatgcgggcgtttatctctcatacctggtcagagtaccgagataacaagatcgatcttatgaacgctgctatcgtgactgacagtgcgttgcaacttgcccgagatcttgtgcaggaggtggtggatgactggagcacatccaccccctctatcgataacctccaggaaatggtcttcaatgtcgcttgttttactcggggcatcgatgcgaccccatctattgaaatcggcctaccatataataaacacatgtccgatgtagccgagtggtgctatttgccaacacggatcttactggaatcattccgagacgttctgcaggataatcatcttccggtcttcaagaaaggctttttcggcacttacgatcccaaggctaacagagaggggatgtccgtgggccagaaattcaacgaagacaaaatcatttttgtccaactaatgccagagttctgcatgatcgataagtttggtattcgtatgcttacctccgatgcgattactgcaggtcttgttgagttttgcaggaccaaaaaggctaccctgtggcttagcttcgctgcacaggtgctccttgacgttcatcacatcatgcgttacagcattttaggtgcatttgacgaccttcggatgtctggactgcgtatcacaaaaactatcgacgactacttcaagggtaccaaatcacacccgcagccccagttctggcccaaggagggtgatgaagaaatcaaagatatacacttcactgtggcttcatggattatccaggaccccttcttagaacggaagcgtgtttcgatcccaggctatgatgtatcagaaaaacatgtgcttttctctcagcatgccatcctttgtggattgagcctgtttcatctcaacacccggatgcagtctgttggccaacagcttgtgactcaatggtatgatgtccagcaactggctttcttgtacaatctcgcaaacactgatgggcatatgaacttgatttggcctgatatggaagcgtttattaagattcacggagagtcacatatattcattggttctcgaccaaagaacgctagcgagtctttgaataggcttgaattggccacaggcatatcgtccgccgctaagtttgcccgcggttcgcgcaagagacaagacttccatcgccctgatggaaagaatcccagagtgctgacgccaacaactacgatcgcgaacttgttccgggcccagtatgtgtctggttttagggaagaagacggcattagaacaattgacaatgttctggatacgctttctcaggaaccgtgtctcagggagaccagcaaggagctccagccctccgatctgcaagtcatgttccaacagaagtggtcccatacccgaaatattggcaccctgcaacttcttactcttttgaagagcaggttgtccaaagaagagcctttgctcctattcaactacttcggcatgcacaagcgctccctggagctgctgaggctgatcagagcaaaagaacatcacaagtttgtccaatattttacgactgcgtacatgcccgatgaatctctcatctcaaacattgtgattctggtccaccatgttgcgcgaggctcggcacaaaatgcgcgtgcattgggaatgtcttccatgggcaatggcagtcagatttgcagtcgaattgtcatgagctgtggtgaagtcatgcgggattatcttcggaagaatggagatgtggcatgcaaagagctaagggttttctgcaagaacaaaaagccaatacaggatgagatcgactatgataagggcaggtccgaggagtttggctactggtttggtattgaagaggctttagacccaaaggttctcgcctcgctcatgaccgggatcccaatagcttagctgatggctctggttaagctcttcaacaatcgacgaatacaagggggattttatgtatcaattgcccttatttatgtgatattgatgcattcttatgtctgacatatactactggcaaaatatattgaatctatacgctatgtacattctcaacgaccgacgtcttctcaacattcagtcccgtcttagtctcaacatgctccttattcagcttagcttttagaataaaagccgaaaagaagacaccaacagcagacatgcacgtgtaaagaatccacatattcctcagactccaagcaaaagcctccctaacagcaagcaactgcgtgggatcagtaatgaatttaatcgactcgatactcgcagcagccgaatccccagacatctgagccgccatgctggtcgacatcccggaagtcaacaagctggactgtttctggcccatactgttctggaagacgaccccgccaatcacaatggaggccgcagttgccatattgcgaatgaagccgatggttgccgtagcggttgcagtgtcctcctgtgagaccatggcctggatggcgattatgggcgtttggaagaggaatccggcaccaagaccgccgaggacctggtacccgactatctcgccgacggaggatctcacgccgaggttgatgtacagcccgttcccgatggtcattagtgccaggccgatccagatcagttctaggtatcgacctgtgcggtggattattgcgccggtaaacatgccggagaatgcttccgtcaccacaagtgggagaatgaggacgccggagctcattggtgaggagccgtgcacggattgtaggtatagggggatgtagtattccccggcaatgaagacctgtaagtcgttagtggttgaaacgaccaaggggatgctatactaacaaagccatgcgcaaatgccactagcaaggtggcaatgttagagaatcgggtgaagatatccatgggcatcaagggatacttggctagtttcttctcgctatagacaaacagcaaggaacacaaagacccaaaaacaatgagacagatcacctgcggtgatttccaggcaaacgtctcgccgccgaagtccaatcctaatagaagcatgagagtaagacccagcacagagaaactaccgaaccagtcaatggcgcggacgccatccataattttcgtctgggggttgtgcacatccaagaaaaagaaaaggagtacaaatgtcacccccgagaccgggagattgatccaataagtccatctccaagtgacatactggctgaaagcacctccaagcaacggtccaaccccaccagcaaaagcccacatgacctccatcaggccgagatataaactgcggtgtctgttacgagtcagtaaacacagagaagccaaaagcagataacccagatatcttacctgacactgaacaaatcggaaataataatcgtaaccagctggagcaaaccaccaccagcaacgccctgcagcgctcgaccagcgatcaacatctccatactagtagcagcagcgcaaacaatcgagctgaggaaaaaccacccaacagccaagagcaagataggtttccgcccccagatatcagaaagcttggcccagatacacgcgctggcggcggagctgagaaggtatgcgccgccaatccacgtatacccagcagacgagtggaagtacgcggcgattgttgggatcgccgtggccatgatcgtttgatctagcgcggcgataaacatcgatagctagtaggattagtaggtgaatatgaggatttggttcgtatcttactgaaagggctaccataatagcggcaacttggactttgcttcgccctttgggcggagcttcctggatttctattgatgctgccatttctgagagatctggagttggagatttcaatttttgaagttgaagacttgaaaatatttttcggatcggttttgtggggctcatctggtatggattcttagtcggttagtatggtagatgatactgatcttggatgagggtaagatatagcgttataggcctcgtttacatcagaaaagagtttgaatgaataaaaaagttccatttgtgaaagcgccacccacatatagtcagtatgtgctaactcaacgccaacgaagacgaaaaaaagagaccccagtaaaccagtagtaattcgaaacgaagtattagccaaccctcctaccaaccgtaactccaaagttaaccagcgccgtcgcagactcacaatgagcctcaaactcgcgaaccagcccatcaacaatcccacgtgcctgcttaagatcctcagcttgaccgataacaaccatagaaggtggcgtcagcgcacgcatcacacccgcgacccatttctgcgcgaaaggccgcatatggtctttcccagcagtagtgtaggtctcgcggacgacgtcggtgaacccatgcgcagagatctgatcatacacgcactgcggcgcaaacggccatagacctagtttcagcatggcctcgatcacgcatgaccgcagtcgggttattgctgttggttcgggtaccgcgtctgtgcagaacgctgtgtggtcgacttcttcccattggatccagccgtttggttctgcggttgttttgttagttgggagtccaagtttgagagtagtggctgttttttttttgtggcgagagtaagaggtgaggaaagacatacttagtaaagcgcgcgcgttggcgagcacacgtgcgtaatctgcttgtttcaagcctgctgtgaggagtcggatgtgtacgaggtcatatcggccgcggtgagcttctgggaacgggcgcagtgcgtcgtggacgcttagtttgattggcatctggccaggtcgttggatctcgtggccccgtgggtattgggctgaggagatgtcgaagccgtggagctcgactgacttgttcgggaggatattggcgacatcttcgagccagacgctgtagtgggttagcttgtgtgtgacagtggttttggtttcagatcctcaaatcaacatacccagtgccagtgccaatgtcggctactgccgtcaggtctcttggaatagacgggtgaatgacgttggagagctccacgagaaagcgatgctggtcattgagactatcaggtgttagcagggagatcgatagatattcccaggaaatatttgaacataccgtgtagtctcggcctcatctcgatctagcaggtagactggcgagacactccccatattgcccaagactttgaaaagcctggacaaattggagagaagtctctggaacgaggaaaacattttggccattttggtaaggtagcaaacacgaatgagtttgatgtgaatgagaaagtgactgacagagtcatcttcctcttcttatagtcttttctctgatcataaaattctctgaatattcaaatatccaaatatccaaacctcaatcacctcaatctccatatgccagcaaacaaagaaagtcatcttggatctccacataataaccacgcgctagttcacatccccgcgccacgatcgaacggattgacctatccgagactcttcttagatcttgagtattagacgttcatgcatggaatcccctattcggcttaggccgagtttcttgctggctagtgacatggatacatcaaactcagcccaatatccagacagccttaactttcctgttggagaggggcttatacgagacatctgtacatggtagaattgggaagtcggaatgcaaaagtcccggcgtcgccgtggtcgtctactccgtaaaaaagccccaaggcgttgtcttttggctttatggcgtcaaacggagtgtggaatacggactggtcatgagtctacagactatcggtctggaggaattcagatgtaatgaacgcccaaagaatgccacatccccgaaatagatacatatcaaatgtaattttagacagttattttacaaaatgagaccccaaaaaaagagagataagacaccattggctctcaagacttatccaccaaattagcaaacacataccggaaaatctcccggctcttatacaaattctccacccgcatgcgctcgttatccaagtgggcgttgtcactcgcctgcccacaaggcaagttagctgccggggccgaaaactccttttccaggaaccggatggtcggaatcgacccgccctcacggatgaacatcggtttcactttggctgcgccaggcgcaacaggcggtgttctggcaatcggatcagacttgggccggattggcaatgcaactgactcttcactcgatgtcgatgtggcttgtgtgagggtggatgacgttggcactgtggaggccgtttgcgaggaccgtttgcgcgcggcttccttgcctgctgatgaggtcgttgtcgatgtgattacccgctcaacgtgcgaggctagactgtcgtctgagtctttccggcggagttcagggattgggcccgcgctgggtttgggcttgctcgctgggtgaatgtttggagactgtgcgataggtaggtattggagattcgggtcctcttggaccggggtccacgctgcggtgatcgcctctgacagcgtggcgaagatttcgttatctgggtctccgagccaggcgtcggatttgccagtgatttcgactgtgaggtcgttttgtgagtcgagcagtgcgaattgctcttgtgcataggcggtgaggtcggctgcgacttcgtcggcgtgctgatcaggtacgatacggatcgatagagttgccttggctcggcgcgcgatggtcgttgcgctcttgcttccaggaacttccactgagtggacggtcaaggcgggttcgcgccagcgatgcgtcaaggacttgatcagcgcctgactgtcggggatctctgggtgctgcacaagcaatacatcggaaatagcctcaaacctcttctgctcggcgtccgtgagtggcctgacagcatcgtggaagccaggcagattaattttgcctttgcgtccgacaatcgtggacaaaagcatggtaatatctttgactggttcatccagcaatgtactgccgtcgataccactgtgaaggtcagggtggtcgctagtcacgaccaaattggcgtgcacgactccgcgcagcccataagttaagcacggattgtagtcatcaagccagtaactgttcgctaggagaacccagtctacagatccgatctgagccttgtgctcgcggactgtttcgtggaaaccttgggatccggattcttcctcgccctcaatgaggaaaatgacgttgcatcgcaaggtcttcgtccgggcgagatcagccgcggcatacagtgatgccagaataggtcccttgttatcagagacaccacggccgtacagaaacccgttaatggaagtgagctgatagggatctgtcctccacttgggtcggttcgtctccgcacccacaacgtcatagtggccatagaagagaatagtcttgtccaccttttcaggtgatgtagcgttgaatctagcataaacaatgggattggtgtcctggccggtaggcaggagcttggtcttcgcaccgaggtagttgcagtgtcgccgaaggaaagcagcaccctggttgcattcgccagcgaatttgggacttgctgagatagtcttgaaagagacgaactttgcaaggctgttgaccatttcgtctgggtaagatttagcgagcgttcgacgcgaatagactgtatgggacgtaccgttgctgatcggaggaagctcttcctggatcgagaaaaactcagtcagatcccagattcctactgagttgtcatttccaccagtggcgtagagctggcgatccttgaaccgtccaacagccgaggcgagcatggtgccctcgtgagcgacccagccaccgacctcttcgaaccgagagttgaatttctagcggcggtcagcggaagtcgatttgaaggcgacaaaaatagaccagtacataccttgaccgttccactagagtcaccacaaatagcgataccctggatcacgtgcacagcccacagatcaccggtatgtctagtgatccgcttaacgagctgctgagagtccaaattccaaatgttaagggcgccgcccgccaagccacagtagagtagtgatccctcaacagcaacacttaacacaggatctccattctgtagcttggcgatttgggacggagccgcgccaggatcctgacccaagcgccacaacttcaccacaccatcgcccgcaccagtcaaaagaacctcctcggaaggagcggattcaaccaggcctttgactagaagcatagagtagacgtagccatgatgcgcgaatagcttatgatgatcccgcttgaagctcaacacatgaccaccgtcggagagggcaccatccgatgatccgggagctcgagtaccatccggtcctcgggaatcaaagaagcgatgcgtccgtttggacggatgggcggacgatgcttggttcaatgttaaaccttcctcggaaagatcacaccactgtttgggtcagaatgtcgctaaatagggtacagacacgggtcaagtacctggatactggtgttctgtgcaccgcagtaaatagtttggttatcggatgaatagactactgaaaatatatcgcccacatcgtggtgtgaataaatcgagtagagacgctcaaatgttcgcgtggaccacacctatccacgtcattaatcccggccccgagattcttcaattgcatgactcacattgatcacggagtcgcccccacttgaaaatagtaagttcccatcttcggagagataaaggcctagcacactctctttgtgtgcgtggacggataccacgagatcaaaggtttccagggaccacgcctaatgaaacggttaggctcaagccttggcgtagcaaaacatagacagaaaagaatcgaaactaacgacaatatctcctccttgcaagccagcaaaaacacagtgttcatcaagagccagagcgagaacggagcgactggcgagcacgcggtgaccgatgccgcagtcactatttggcagggcactggcatcggcatgagtatgagaatcagactcccaggttttctgatcctcctcggacgtgctttctgattcgactaagtccataatcagtccaatatgctttaattgcaatggtctgcaacggtccaatggtctgtgatggtcgttgtggagagtgaagtgatgttggtgttctcgttttgtctccgctgcaaatgaaccaaacagaacactggaaatctcccttcactccattctgctttctttttggttttcgaggttgaagagcttcagtttttttggggaaatgcaggaatacaaagaaatatcaaagaaatacgaatcatcaaggcggtacggcaaaaaaaaaggaaataatagcaagaagatattgcaccatcgataaagtatttgactcaccatccctagcatccctttgattccgacaacaagtccttctatggagaaaagacatcagttgtcgaatccattcgcttgagctctatgccacggtcgcatgtccattgcgtgggtttgaatattctaggaagtcagaactatgagacgcaccttggttcccacaatagccgtgctaagggggtactggggcgacggctgatcatgatagtgtatgtacggagtatgcggttcaagattcaggatggattcgagatagatttagatcgagtgggtttgcagtatcaatgaaaatagtccatgaaaagacaatgaagtgcacaccgatgttgatctgcactccaatggaatcttgaaagctttattgataagggagagatacctacatgtactccggacttgccagctgagatcctgcccgagacctactgggcgcaacgctccaacccctgatggctttcttcttcagccctggactagaaacactagcctgcaggtgcccatctatgatgaatgtgtctagggtcatcttacaagaaccagaagaaccccggacaatgactcggaatgaaagtgatacaacagtaatggcgccattatcggtcttgatatggtcattgcgggaatatacctcccacaactgcccatcggtactctatactccgtagagacacaatctatatccctggaggaaaaaaaggagagtctccggggtcatctcacatgttaaagcctctcagcaccgccacacgaggagctgacgttgtccgacaccagccacagtggcggtgactcctcccagccaatcagcggtcacatgtcaccgctctttgcacgtcttcctcctctggcgctatctcaccagctgatcaacagcccatgcagactacactacaccccccatgtacctacgtcaaaagagtctggattattcctttttcctttgccctttcgccggaatctaaatataacaatgtgatctccctttccctgaaaattctcttccggatccccgcacatgcagctataccgcaaagatcgactttggcgcccaacagcgttcgagtgcgtgtgttgtgagctcatcgacttggctagtctctgatacgtgtcggtctcctcaagtctcatccaattattcttccctatagctctgtaatctgatcctgtttgttgctctgcccaacgtggatgcgtttgacccccccagcctccgtgtcccgcatcacttctccaaggccttagaccctcgttgttactccgatcggtccttttgtgctgatcaaggcctgaggttaccaacccaactgctttattaaccgagagctctccagggctgtaccttgcttattatcctataccctgcttagctcttcgatacttgatctataccccggacaattccttttgaaacagtctgtgtccccttcaccgcttccttatcggctgtcgatctcgaccatcggatgactgattttcggtaaggtcgtcgcaacgacatactctctgctatggcaccttttggtcaaacgatcgctgtgattgacaagaccggcaaggttgtgagcacggtaagttcgatctccggcggaaatccgagcattctgaccaggattagagtaagcaattattcggtgttttcacccatgccaaaaacgcctatcgggagcgcaagtctgccttccaatcagaacgcaatgcaaaaattgcagagcaacaagcactcgaaggactcgccaactatcagatcgatgattcggtagcctcttctgaacggaaccatgggactcggtcaaagcatcacagcggccacggtcgaagctctcattacgggccatcggcagcaatggcccgccgtcacacctctcacgatgtgtcggtccgaggtgcccctcgtccaacgggtcggtcaaaatcggatgcgcatatcgacatggatcttgcatacggagacgcctctcatgcagccttatctcgatacaaccccccagagcccaaaaacgaccaacaacagcttgatgttcttgtcaaccgtgcacagtggattcttgaagaggcacactgtttgcatcatggtgctgccgcgaccatggcccatctccagcagaacccaaaagccatggccgccgtcgccttgactctagcggagatcagcaatctggcccgcatgatggcccccaccgcattagcctcgctcaagtcagccgcgccagtcgtcttcgctcttctttccagtcctcaattcctcatcgccgccggagtcggtctgggcgtaacggtcgtcatgttcggagggtacaagattatccaaagaatcgcagccggtgctatgggagagtccggcaaaacggaagcagaaatggaagaaatgatggagttcaacacagccgaaatcagttctgttgagacgtggagacgcggtgtcgctgaccagcaagtctacagcgctggaacatctgtcgaaggcgagttcatcacacccgtggcagcggccatgtcgggcattgatgtgacgactgctcgggcgacacgggatcctcgtttcaaatttgatgaagatgcctcggtcgcttcatcccgtcgctcccgtcgttcacgcaccacccgcgctccggatcgacgcgatcgaaggtcaaaagctcctttggaggaaccgagtgggatcttcgggcgaagctcctccaagtccaaggcgccatcgaatgttcccagccgcacctcatctaaacacggcacctatgtcaccgaaactgagaaaagggagaaggagaaaaagaaagctcctagccggctacgccttatgttcacctcttccacttgacacccaatcctctccattcgacagaatcataacatgtatatccacctgtctacgctcttccgatgttatttatgggcgcagatgcgtttcatacggcccattcagtgcctttgatccactcaactcttacgacgacccatgacatatgcgtcacttcctcccattcaatatttctttttggatatggttgtcgctcgctttctatttttcttcatcttcattttccttcccttcttctccttcttcttcttcctcttcctcttcctcttcttcctccaactactttcagctatgcagccccttcacgcaagcatattttggtgttcattggcggcatctgctgtattatacaaacaccaaagaatcatttagatgaactacatatcttaagaaaaaaaatattttctatcatacatattctgctacgtgttcttacactattgatgtctaactcggatatacatgtacaatcatcccatccatcaattgccaattaactggtaggcaagttcgtctaattgaccacaagagtgccgagcctctacatataaagtaagaatagagatgtaggtaggcgcagaacacgctaatatatataatagtcctgggttcatatggtctgaggtagattgatagttagcttccagctctcataagtgatagttagggagatcttagtctttatgaggtagatggactcttgtcccgtattagcaatgacctacctcaaggagacctactccgattaagttagatcatgacttccagctctgagctcgagacagagaacggtagaattcgatccagctgtctgtgatcgggagaccaagcatcgagcatagaatatatacactaattcatctaccatggcgccgaggaacctttaacaatgctaaggctaggtaactctttgatattctgaatactagtcatggtgttctcaaagaaagccaatgatcgacatcgtaaaccccttggtggatacttgcacccaagctcaggggcacagccctctatgctatttatgttgtagagctttgaagatagacaatctatacagggaacatctacatttgaagagatagagagcgtgtaatcagcaggatagtcatcgaaccccagtcataatatccaacggcaatgcccaatccatatatctgctgtgaagcccaccaagatgcatcatgctacaccaaaacagccctcgcagggatcgaagtgaaacccagtctcattaaggccccccgtgggagaaatgatctgacgttagccggcagatgaacggtttccaaacagccggaggtttcagcatagaatatcccccattggctaattccatgctgacccctgtctactcccggggaatcggaggtgcacgccataaagccggagattattacatagtatgtatgaccatttttcccatttcccatttgggattgaggctggtggcggtaagagaatgtatcaaatgcagcatactccctaggatctgctttaaaccctcaaatattcgacatttatgcaatgctgggtggcccggagggacccgttagcccccacaggaagccgcaaagtaccctcgcttggccaaggacccaaatgctataagggaatgatgtcccctttctgattcctccgatatgggaggggtatggagtagataagagggtgagatgtggatcagtgcaggctctagagcagctcgggatctgataattgtatgtttgttttgtgagatttcgcctcgttcttgaaatagcgcaatcttttgaacagacatactggaggggtaatttcgtagagtacttcaaggcctggtttgccagaaatctagtcatttgatgtatttattctcatcatacattgctccaatcctcctataacggaagtttcaagatggagattccaagggcaaatgtgcctttagatgtgattgttgtcgggtaagatttccgttgtgcatggttcaacatgcgagattgtcatgctgatgttttgtagtgctggtattgtttctgaacgccgaagagctgcattggctcgagacaggagttgtattaaccatgattgaataggcatcggcggtatggcggcagccctcacattaggtcttcgggggcaccatgtcattgttcttgaagctgcacggaaggtatatgtcgaccgaaattcatagtatatcaagcaaggctaaccaatcatggcagctcatggaagtgggcgctgggattcaagtatcgccaaacatgctgcgtttattcgaccgtgagtctgccttctgccagaaaaatatccatgctaaaccggtacagggtggggagtctcggacttgattcacgcccaagacgtagccctagagcacatccacgtccgaagatgggataacggtaaactcctcgacaaggtgccggtgaataagactttcgggcagcaagtcgttattcaccgcgccgacctgcacaacgctatcatcgacagggccctagcgttgcccaacattgagctgcgtgagaactcacccgtcacagacgtacagttctacccagcaagtgttagcctagccaacggcgaaatcattcgtggcgacgtggtaatcggcgcagatggaatcaagtccacgatccgtagccacctgctcgaagactcgactattaaagcagttgcgactggcgatgcggcataccgtatcatgatatcccggcacattatggagaaggatcctgaactgaagaagctcattgacgagccgcaggtgactcgttggcttggtccttcgcgccatattgtcgcgtaccctgtccgcaagcacgagctgtacaatgttgtcctccttcaccccgatagccatggtgtcgaggagtcttggaccacgaagggttccaagcaggctatggttgacaactatcatgggtgggataacacggtgcggaaactgattgatctggtcgatgataatgaagttttggagtggaagttgtgtctgtaccgtcctctgagaacatggatccggggatctgtcgctctaatcggtgatgcgtgtcatcccatgctgtatgtgctcctgagatttggctgttggtttcaagactaatctcgccttagtccgtatattgcccaaggtgctgcccaggccgtggaagacgcggccgcgctcggtgtaatattgtcggctatttcatcacgcgaggagattccgcatgcattgagtgcttatgaaaggtcccggaaaacgcgcgctgagacagtgcagcactctggatcgaagaatcgaattacgttacatttgccggatgggcctgagcaaatggctcgagacgcgctgttcaaggcttcggacagcggaagtaaccccgataagtggtcggatcgtaggacacaagagtttctttggggttgggatgcagagaaggcggcgttggatacttggaatggtatgttccgttatttcctggtcatgtcatgtgctaacttgcggacagaagatcgaggacagaccaggctcaatgcgaatctgtagattttgccgacacgatacatcacctgctcataatcggttgtggtaaccataaagggactcgaattagagtagatatacttagagatagaaatattcacttcattagacgcatgagtgagctcgttcaattcatacaagacattgcatttttgctaccaattccttaagtgttaatattttctagttcattatacagtcattcgagcccaagaccatccatcagacatcggtggaacattggacaggtagacttgacatgttggcccgaggaagccagggacggtcaacatttggcattccaatcgttcaaaattgaacaatttacaacctctcgccagcggcggccttcatctgaccgtacttcttgagacgaatggcagacacgttgatgaagccagtggtctcggcgggggagaagtcaccgatctcatccatggaagactcgctcatgtcgtagagcttctctgtctcggaggagcgaccgagaatggaaacggtgcccttgtaggcacggcagcggacctggccgttgacggacttctgggaagcggtgatagagacctcgaggaactcgcgctcgggggagaagtacatgccgttgtacaagagctgaatatgttagatgagaaaatagaatcatggaaagctcgtgcttaccttggagtagttgtaggtgacgaaagtatcgcgcagagcacggacctcacggtccataacaagaccctcaaggtcactagacgcaagttagttgtgccataagaaatttcgcaatacaatactcacaggtgggcagagcgcaggcaggtaagaccgggggtctcgtagcagccgcgggacttgataccgatgaaacggttctcgacgatatcaatacgaccaacaccgttgcggcgggcaatggcgttggcggtgaggaagagctcgacagagtcggtagcaaccttcttcttgccaccctcagtgtactcgagcttgacggggacacccttctcgaagtagacagtgaaatcctcgggctgatcgggggcggtcagggggtcctgggtcagcttccacatatcggcgggaggagtggtatcggggtcctccagaataccggcctcgtaagagcagtgcgcaaggttctcatccatagaccagggcttagacttagtggaggtgacgggaatacccttctcctcggcgtagtcgagcaaatcctggcggcccttgaagcgctcgtagaagacggggtcgcgccatggggcaatgaccttgatgttaggctggagggcgtagaaggcaagttcgaagcgaacctggtcgttacccttaccagtgcagccgtgggagacagcgaagcagccctcgcgctaggtttgggtcagtatgacatctttctgctagcagcgaagtaaagcgtacctgtgcgacctcaatctgggcacgagcaatgacgggacgagccagggaggtaccgaggaggtagacgttctcgtagacggcgttgcaagcaatggcggggaagcaaagctcctcgatgaactcgcggcggatatcagcaatctcgcacttgagggcaccaatcttcagggccttctcgcgagcagcctcaaagtcctctgcaaagggttattagaccggggttggatgataggtcgacggaattgaatttaccttcctggccgacatcggccactatgttcatattagtagttgatcttgattgacatggcattgaatcgacttactgaaacagacgacctcatagccctcttcgatgaggtacttcactgaaattcggtattagtatcctcaattggttaatgggttgaccgatgttcatacagatgcagctggtatcgagaccgccggagtaggcgaggcaaacctgtgtcgaactgtcagaaagtgtggatcgggtggcggtgtaagatagaatggggacttggggatctgataagggagcgaaagcaatagttcatacctttccctgtgccattgtgaggaattgaatcaaattcaagaagacttaagacgtggagtataaaacaaaggaagattgagtcattggaaaaaatgtcaattttggtgcgggccggggaagtcacgggtccgagatgataaccctgataagatagatcgttgcccctccaatcttcgtccaactcaaattcgagataactgctccagggctagaacaggcttataagtgatggctttcagacctttcacaaagagatctaagctgtgaagctcattatgaatagtcaagtccaggattcattctgtttcccatggaaaagacgagcaaagatgtatgtttcctttcaagataccattgcagaatatattgagtccgatccattggaaggcagtgcataactagcgtatagctccgtcattctatgttctatgttttacattcgatattcatatttgcatgatactgtcctttatcagggatactatgctgtatgttgacttcgtgataggtccggtctgacttgtgtgactggtttgccctgtttgcatcatctcggctatccgcggcggtttccccgcgcaatgcccccgacaatgaacaaggagcaatttaaaggcaatcatccctacaaaaaaaaaatattatgtatttccattctgttcacatcccacaattctagccaaagatggcttctttacgaactcctttgcggtttttcgctcaagctcctcgccggttctactctggagctcctactccggcagcgaagctaaacctacctattgactacaaaaccactccgattttacaccacacctcagcctccttgtcaaatacatcagagtacccggcagctgccacgagtaaacgactcaatctctaccaagcaatcaactcagcattgcggaccgcattgtccaaatccgatcgaactattgtgtttggcgaggatgttgggtttgggggcgttttccgatgctcgatggatcttcaaacagaatttggatcggatcgggtcttcaacacccccttgaccgaacaaggcattgcgggttttgcaattggagcagcagcggaagggatgaagcctatagctgagatccaattcgccgactacgtgtttccagcgtttgatcagattgtgaatgaggcggccaagtttcgctatcgagagggtgggacgggcattaatgttgggggtctcgtcatccgcatgccgtgtggcgcggttggacacggtgctctgtacgttacgtggagtgccaagcaaagcggtatgctaatcaactgatcgaatagataccacactcaatccccagagtcgctcttcgcacatattcccggtttgcgagtagtcatgccacgctcccctgctcaagcaaaggggctacttctgtcttctatcttcgagcacaatgatccggtgatcttcctggagcccaagatcctctatcgtgccgctgtggaatatgtcccgaatgaatactacaccatcccgctaagtaaggccgaagtcatcaagcctggcaaggacttgaccgtcatctcatatggacagcctctttacctgtgctcttctgctatctccgccattgaaaaggctatgccgggtgttaatgtggaacttattgatctgcgaactatatatccctgggatagacagactgttatcgaaagtgtcaaaaagaccggtcgagccattgtcgtgcatgagagtatgatcaactacggcgtgggtgcagaggttgcctcgacgatacaggagagtgcattcttacgtcttgaagcccctgtcaagcgagttgctggctggagcacacatactgggctgagttacgagcaattcattctgcccgatgttacaagtgagtgcccaacgcccttcattcttcatttcgttctatcatcactaacccatagtattctttgtaggaatctacgacgcaattaaacaaacacttgaatattaaactgggatgcctcctaggagattataatgatacgaaagccatttttacctgagaacatcatccacttgcatttcaatgattgtgaccaggtccaaggaattctatcaagcaaaataacaatgccaaggtgaactttgcttactcgcaatagtctgtcttgttctcaatggcttcacaggaaatattaaatactgtttctagttgccagaattgacacggtactacaatatgttgttaactatgtacatcttattattttcaaggtctctcgaaaccatttatattatatctcttctttcaagtatatgggtgtttgcattgtcttccctttctggctgttccctcgttctcacgtgtccatgtgccacttttcaccgtcgagcgccttctttcccatcttcccaagctctttaccttcttcacttaaccccattcaacttaaatctatgtctggctcctatatcttgttccctcacttgtttcacgatgacgatacaattgatgatgtgactcttgctcttttgcaatggcgatcagcgcttcgacagcaaatgagaaccaacaggacgttctagcggccacgaagatatcgacacaacgttaggaattaggtatcttgcgggagtgcactacttgttcggaaagttatcctgagccggacacgattcggaatagctgcccacacgtttactgccgagggtgtgtcatccgccttctccaaaacgctctggctgatgaaagcttgtctcctcctcgttgctgccgttctcctttgccgttggaagctgcgcgtggcttcatcgacgatggactgtgggagggatttgaagctggatgcctggtttcattctcaaatgctggaattgtggactccaagcatgcaatttctgccgatcgaacaggctctaattgacagcccccttttctcaacctactttgatgcacagggtcagtctccccttccccccgggtcaacgcctattctcactcaaagcaattacagggaattggatctccgaaccaccaatactaaaaacctcactcgaggactttgtcacaacaatcccaccgggggaggagaaatatcagtttttacgttttatacggaaaattctgacctgggaccaggaagtgagagccaccgcgaacgaaattataccggacgaatggcttatgaggctgctttgaggggacgctctagggagaccctcgggtgtattcggtgggcataatatccctagttttcagcattgtctgttaatggattctacaatatatctctttaataactataaaaataatactacggtaacctccaatttgcaatatctacagggttaccaaaaagctaattgagaactgtggccagtggtagacatacataaagtagttagcaacctcggtgaccgtgttgtctttaacaagacaaccagtttgtgatattctagtcttgaaagaacatatagtcatgtatgccggaatatgagtaaaaacacggaaacgcgatataaaggcccaagaacagccctttcagccctgagcattatacgcgcaataatcgaaattattcgcacgattacctgcccacgtcgggaaagcaaccgagttgccagaaccaccgaaaaccgcaaatgtagccaggaacaccatgacttgggtgccaccgtccagcgcagcagacaggaggtaattccacttcacaaaccactgcggtcggtaacggcgcagatagaactgaccgaacgcgccgaggatgtagtagctagtgagagaagcgttcagaccaacgaagagttctccaaggtaccacaaaataatggccgagttgaggtatgaccagattcgctggtgcgggaagagacggtgcatgatgtagaagggcaatggggcgatgaagccgactaggaaagctgctgtgacccattcgtagcgcgcgccgatggagaacatcttgggtgcgatggaccatgcaatggcgagagtgttgaactgctggatttgggcgccggaccagatgtttgttccttcggcggtttcgaggatggttgcttggttttggacgatgctggagaggagttagactggatgggaatcttataccggggtaggtaagggatgggacttacgttatcatcatcacatagttgagaagggcgcccatgacacagccgatgacttgtgtgacgaacgtcgctttcggtgacagtttgttctgttgggcgagtttcagatcacggagaagcagccacccttgcgagagaccgttgtaggtgtatgtggtgaagtacatattagctggagagttgtcagtggaatgatctcaaaagcagtcaaagtagtggagtgtatacctaaaggacgtccaggcatcatgtaaccagcaatcatttggaaaatcggctgcaaggtgtatccgaagcccgtaatggcatactgcgccccgaagaagaccataaaggtgacgaggaagatggtcgcgacaataaagccccaccacggaagggtggacttcatcacgtataagcatatcagaccagtgacccagctggcaacgaacactaagaaataccaactgctggggacttca
